United States Patent Application Publication US 2024/0310389 A1 - sequence listing, part 2

SEQ ID NO: 91 - DNA, 92643 bp, Homo sapiens
  source 1..92643: mol_type = genomic DNA
gaagaatgattaatgatttatttaaaagtagttttctcaaactctctgggatagaaagagcagggtcctgttatacattttactcaggtggtggttctggatatatgtttcaaaatagctagcacctaagtttctttgagaaagctaggataaaaatacaagcataaccaagttaattcaatacacacttattaaatgcctatgtgctacaggtactgtatactaggtactgtgtgctacgtgctggggacacaaacacaattgcaacactgtccctactgttaaaaagttcaggatagatgactggtagggagagaagaaaggacaaggatgataacctttcagctacctttgaactagacctttcaggtagaaacgcagatcatgaacattctaggagggaagaacattagcagacggcagtggaagcttgcattgctactgcttatgaaacaaggtttgtggacagctgaagagcagcctagggacaccaaggccaggtagtgaaaggccctaatggtaaggagactggagagaaggtagaaatctcagagacattttaaagttacactcaacaggacttgaaaaatgcaaggagaggactactgagtatcattgcttgattaagttggatgggaatgtcattaaattataacaggataaaagaaatatgttttcattgaggtatggaaacataaaattttaatgttgaattggctatctgcaggatacagccatctatattaggatcttgtctaatgacatatattcacccacattaagtccctgaaggccagatacagacatgagaagatatttcctaccttagttgataaactttccttattatttccataatccacttaactgtaaagggcgtagggattcccacttatgtattttgcattatgcaggcaaacattaaaaataaatcttacaggcaactaaaaaaatggttgaaaggggctcccaacaggacagataaccacagtggctttgagctttgttgtccaagtacacaaaactcttagctgtctcacttgcttcttcaatttagcttatgtttaattttgttacgtgttatgttagtgtgaaaatgagtaagaaatatagggaggacataaacagagtcacttatccagggtagcttaaactaatggagaaaagtcaaatcctactatggaaagtagaaattaaggattataataaaggaaaagggcatcatcaaagtacaaaagatggttcatatatttatctaaccatctactaacatagttgtgtaggacggcaggaacagcttgagacatgatcgtttttatggcagaatggctgcctcaatgaggactaaggtgctcctggggcaagcagatcccctgcagaaaagcttagaattaccagcagagcatatttaattcctcctgtcaggaataacagatgctgagatagccccttcttgtggttatttctttcctcttcttgcagcttcaagagtcactcatttaagtcattagttgatctgtttgtatactccagaaagcatccagaagttcttagagtatgcccttaattgtacaacttgaagttcaggaacatcggactcacgataactctaagcaagtgcctgggtctccatttccatcttcactgaaaacactcagtctttagttgggacttattaaaacactaaaactagctacatattacataaaggtgatgtgttaaatagatggtttaagtgactatcttcattctgttgcactcattttggaaatggacatgttcctgtttctataatcctttaaaattcagtcttttgtgaagagaaactactgtacaaatacttttacgtcataaaccaaaaagaggtctggtatctatcccatttagtattcaagtctacagaaaaaatccaataacaactgctttattattaaaagttatgaaattccataaagcaaagtaatctgcattcaactaacaagtctgatacatgtattaaaaaatatataacatagatttgtctgttttaacatttatattctatttaaaaagtagtgactttacatattttgcaacttgagtttataaaatatatacatccaccctattcaaatcctcaagcatgagctttcattcctattaataaaatgcacactctgtagttctgaataataaaaggaaaatggcaccaactaaaacaaacaaattcattttgacctgaacatgcatttagtttttggctactaatcaacccaataatccattttaccttgaacctgaccaccaatttgcctttacataaacaatctgtggttaactatgaaaagatgcattttcatggtatctgacacaatttaccaagttccttatggtagatttcaggctttaaattgtaagtttcaggcttcaaaagaggcaggattattaaatctttccatacaccagaaaatctgacaagtgatgtcattttgaaatcatgcttttgcctttgagaaaacaacttagaattgttgtaggaccaatgagaaaacaacttagaatcgttgtaggaccatccttttctcaaaacccagagagtgtatgtgccaaggactagaacaagaattggatctctccttttcccagtcaactcctcactcaccatattaaaactggagttcttgaggtatgttaagatagatcagcttctattcaggcattccttccacatactcaaaataccctcagatattttattaacaaaaaatttttcataaaaaaatagtcatttaatcattctagagactcatcacaaaatacaagtcacaatattaacatatgaaaattaaaattacaattaacatctcaccaggatcaaagaaccctaacttcaactttcaggatagagagctaagtttcaagtacatgtctagattctatgtgcctctaatgataatgatgtacataaacctgtcttaaatcggcaaacagacgaggcatggtggcttgcacctgtaatcccagcattttgggaggctgaggcaggaggaatgcttgagcccaggaattcaagatcagcctgggcaacatggtgagacctcgtgtctttaaaaaaaaaaaaaaaaaaaaaaaaaaaaaaaaaaattctatccatccaggcatggtggcacacacctgtagactcagctacccgggaggcaggaggattgcttgagccaaggtggtcaaggctgcaatgactgttccactgcacactccagcctgggcaacagaggaagaccgtctcaaaaaacaaaaaacaacccacacacaatttatgttgagaaagcaagtctcccacaaattatttttaaaaaatgattccaggctgggtgtggtgggtcatgcctgtaatcgcagcactttgggaggctgaggtgggcagatcacttgaagtcaggagttcaacaccagcctggccaacacggtgaaaccttgtctctactaaaaattagtcaggtgtggcagcacatgcctgtaatcccagctactcaagaggctgaggcaggagaatcgcttagacccaggaggtggagattgaaatgagccaagatcgtgcactgcactaaagcccgggtgacagagcaagactccgtctcaaaaataaataaataaataaataataaaaataatcattccacatctcaaaatgacttagaaatttaaatggaaaaaataaataatttgcttggacaataatttggctttgggagagtcctcatccgaaaataacaaaatttccttaatattagtactaaagaactaattacagctaacagctcatttaccaagtagtcaattattcaacaaatttagccatctactgacaaactgaaattagtatcagaaactccatgtattttatttgtaggagagcattttaaatttttcaaaaattcatggcataattttaataatcgtccttctgtagaatccctaacctcagaaaaaaaaaagagagaataaattagaagtgagaaaaggaaactgcggaagactgacacattggacatcagtgggaagaggcagaaaaataggaagaaaaataaaggacagatttaaaacaatttaaaaaggactacaaagaggattggggccagttggtgcagattaaaagacaccttcttcacagacctcaatcatgcacaggcagtaacggcattactataacacagaacagtatagtagctgattctgataatgaatcctcagaaaagaagaatatggttaagcttcagttctttttgaaaagcaatttacatacacaattacaaataattgtaaattttaagcattcagctaagatatgtacaaaaaaattaatgaaagtgagatcaagaaatataagcagcagtaaccataaaggcttagaactagtgacactgaattctttatttaaaaaaatttttgtaacacacagtacctcctcttctcttctatttttaggaagaagttataacaagttttaaatatctcaattctgaaaaacaataggcttttaaaaaataagacttgattaccagaaacaagtaatatgtagttacataaccattttcatatcactactcatttccattatttaccaattcatctttgatgcaacttggaaacaattaagcagtcactagacacctgttttagaatctgaagaaattattatccaccacaggaatctaatgatatatatatttgcatatatttaaaatttcatgagggaaaaggtaataaactattctagttattttataccaaatattgatattcctagtcaaaacaacaaggaattaagatctttctccaggtgaactgctgactatatagaagctatttccagcactttcttctggggattaaaaatgatttatttccctgctggctaaaatgataaattatatattacaagtaagtccttcagaagtgaatattaattccttaagagaaccataaaatgtatttttaaaaaattctcttaaaaactgaaaacaatccttctctctaaacctatggcattaatccctacttgaccaaagaaaaaaaaaaaaaagaagggcatcatgttcatgatctaagcatgcataaataaggaagcaaatgtatcactgtcttaatagaatttggcaaaccagaagaatggcctaaaaataaataaataaataaataaaagaagaagagtgtaccttatcttctaagtatgaaagtctaattctgtaggcctatgtcgcaaatagtgccccacgaggaaatgcagggaggaggcaagtagcatattcctatatacattttcttgatattctggttgtctttcaacaatgcattacagagaaatattctttttattattacaagccattaattgctctctgtagagcaatgactcagataaatgccttatgacttttaataatgtaactaacatataaattaaatctaagtgcaaggagttttcaatgattcctaaattcaagagagtgttgttagcctgattatgaattttaaatgtctgtgctcctatattttaggatatttcatcttattttctactctttaaaccataagatgtaccgaaattatttcattttcctctactttcctctgtgtcattttagtttactttatggtatttatatgtagagagagaggtatgttaaaatattgtcataaaaaactcaattgaggctatatatgacctattactctatagtatagcattgttaatctttgactcagtatattaattcctttggtgaataaatgtcaccggtcatttctttataaaagcattttggtaagagaaccagcaatatggagacagatttctccctaacccccagaagaagatcaagtcaaacagtagtgtagagcagttacgcaaaatatgaaaatacataatttacagctgcaattttcatattaaaagcagtttaaaactatgagtaattcaaagactttctgtcttggttaaacaggccaactaataaaactgacagagatcattgtgagaatttatctagtcaagatagaacaaaaacggttataattttttaaaagtggtaattgttaactagcagtatataaacagtgtccacaatttggtggctggccacggttttaattttttttttcaagttatttctatagcagacatatttttgaagtctacccacccctgagttcagcaattatactttgagtgtaaaattatatgcccttaattaacaacatgtacaaagctacaaaatgtcatctatacagattaaaaacaattttaaaatattatttaccaattattgattgaatggttttactggggtacgtatttcaaacctttcagccaactggctttcagttttaagcccaaattgattcatatattcactgcaggatatttcaaaaagagtgcaacaataaggcattagtaaaaataacattgtagtagaaacagattttgcatatgtgaaaaggtaatttataaaatacattaatcactttttaaaaagaacttagttgtagtatcattaactcacatggtactgagaactggacctttcaacaattttttttttctatagaaagtttcatctagctgtaagcaaagtcttttcaacaacaacaaaacaaaaccctccaggaaaaactatatggctgtgtgagacaaataagcaaccatttgatagtgacttttgcctaaattttaaaataaaaatgtccacactcttttgttaaaacattaagcctctgtcaaaaatgtatttcttattttagggtacaggattaaaggacaagatgatactcacaagtaaagaaaatttacaagaaaaaacttaacaaaagtttcaataaaagtattgtaacattcaaacttgacttataacaaaagaaacaagattgcaaacaaaaatgtttacggggtttccaaacataaataaatgaaatagtgtttaggcagtagggctcatgctgatggctagcaggaagttaacagagtgtaacttacttggaaaaaatctttaatgtacaaataacaagcccaaattatggactgcagcaatttaatcatcactgccatttttcttacttccaaaataaagccttgattaaaccattcataccctatattactcatacctttacttcagagattgaggaactatatacaacaaattaatttattttcaccatagggataacatactgtacctctctgccaatgttacttgaaaatcttccatgtcaaaacaacttgacagtagatataaacaattcaataaatatgcaatgatctttcattacagtcctttaaagacgcatgttaattcatgctgttaaccttaggatcacagtgcatagaatccaaatataaacagttggggtgacttttaaagtaatgttggatccctcactttatttatattcccactataaccagtaagttcatttcataggccctatcatgcattaatcattgaatggcaggagttaatgaaaacttttcctgttacaacgcccattgccggcaatgaacgtaccaaaaccgccaaggaagtcattgttattgcacaatacatgaggacctggagcttttccaaaagcttaaaaaaataaaaataaaaaatggaattatatttgacatttcctgacacctgcattaatactgtatgactaataaaagcatgtcagttgcctggactgaaccagcgatcaacatgcgcccagaatgcacacgagtaaaaatgcagtaaaaggaagtagtcttcattgcctataggtcacttccagtcaaaggttaaagttcaaagactgaatgatcaaagtgctcattttctcagtaggactatcttctgctaggaggatgataacagtggcatcaacaagtatcatctttaagaaaaggagaaaaaagataattaaaaagtcaagcatgtataagtaaattctacaagtctgtttaatgtagaaataatttcaattagcaagaagtacatagtttacatgtctgatctgcctcccccaaacctgtgaatacaaagtgcaatatatgttcaattatacagtgacaaatttttattctttcagagaaatagttcacataaaccttaaaatgatatgttattagcacattctatttaaaataataaactgacatgacatgttagtacatagtcaggatgtatcaatcttaagagaattattttatgggcaacaagttcacattgtaatgagacagaagtaaactcctgatcaacagtgccatgctatttaacacagaataatacacaatttgtctttagactgtgaaggaagtaactgttctttaccaatgagatacaatctccaaatcaataaacagttaagattaatttccctttagaaaataagttttcaggccggacacggtggctcacacctgtaatcccagcactttgggaggccgaggcgggcggatcacttgaggtcaggtgttttgagaccagcctggccaacatggtgaaaccctccctctactaaaaatacaaaaattagctgggcgtcgtggcacacatcggtagtctcagctactcaggaggctgaggcaagggaatcgcttcaacctgagaggcagagggaggctctgtctcataaaaaaaaaaaaaaagaaaaaaaaaaaaagaaaataagctttcagcaagtatagatacatatgcaaatggggtcattaaaaaactcatgaaattatttaataataacttctggtagcctcaacacatatatatgtaacacagacaactttaggattatttattttacaaaatttatttcacaaaacatatctgaaagatttattctgaggatgagttattcttcagaaggaagctacataaagaaactaagactggtggccaagagttgtgaaagcactcaaggaaaaaattctgaaatcctagtcaaaatattttacagactgatatggtttggatatctgccccttcaaatctcatgttgaaatgagtgatcccccatgttggagaggggcctaatggggaggtgttcgggtcatgggggcagatccctcaggaatggtttggtgccctccttgcagtcattagttcacatgagatctggctgttaaaggggctgggacctccttcctgtctcttgctcccttctattgccatgtgacttgcctgctctcccttcacccttccaccatgagtaaaagcttcctgaggcctcaccagaagcaaatgccagcactatgcttctctacagtcttccaaactgtgagccaaataaacttctcttctcataaattagtctcaggtacttcttcagagcaacacaaaacagattaatacactatctcatgttagaattgatatactgctaattaaaaaccagtaaaatctgacttctaagctgggcaaactcatagagtattccatgatccagtaatttcaagggggaaacagactggagtttaaaaataaatcatccctaattcattagacgccttaaaataaataagaatagtatctttaagaaaacaagtagtttatatcctctaaagttcactcacaattttcttggcaatgcaaagtggctcacgcctgtaattccagcatttggggaggctgaggtggatggactgcttgggcccaggagttcaagaccagcctaggcaatacggcaaaatgttgcctctacaaaaaatacaaaaattagcctggcatggtagtgcatgcctgtagtcccagctacttgggaggctgaggctgaggtgggaggatcgcttgagtctcagaggttgaggctgcagtgagccgtgatccctagccaacaccatctccaaaaaaaaaaaaaaaaaaaaaaagggggatgttctttaaattattgtggtacttgaaacagacagagaagatatacttgttatggatataaaacaaacttaggaatattaataagttccttaaaacatcgcttctgcaatagagtaacaatagggttggtcgctgaaactaacactaaaactaatcatactcaaatctctaagctaaaagatggcactaaaattctacctaatatgtcaaactactggggataaattttaaggtgatacaagataacaatatatacaataagaaaagtgacagataaaattcaatttgaacataatgttatccagttaactaccaataaacttgtatctccaaagacataccatctttgacaggtggtagcacaaatgcatctttatttactaacttgttcattgcagaaggtttttagtatagtaggttttctgtagaacgtgctaccaaaatgattaggaaatctttgtgaagctactttccagatcccaatccctgtttctgactgatatgatactacccacctttgaataccctcgttttgaagaaacaaatgatctgtaacagctagatcaacagggacttgcgggactacgaatccatgatggctatatgtaatcaagagtttataagcaaactttaagtatagatacaactatgagccaaagccatcgccatcctttttctaaataggatggccataactaagaagcaaaaaacttatccgttactagaaagaacatagtttgctagccagatgaaagtattattggataccaggacaaactcaccccccaaccaaaaataaataaataaaaaataaaaaaaatcagagtaacccattttgggtcaagacaaatacaggctgacaaaaggtggtaaaagaatggtatatttaatctcttggttaaagcatttgtaacaagataatggcctgaagaaaaatctaattattaaccatttatatttttcctggaaattcagaagcctctactaaaattacactttcaaatataacatacaagctgccagtttcaaagaggtgacacctaccatggctaacttcactgggcttctgagaaatgtaaatgagaaagaactatattagaagaaggtcatttagttttctcctgagaataaaaactatcatatagttttccaactatcatggaaacccatctccttggatatccccagggacagaagactagaaaaaaaaggaacacagtaatacaggtcagtggatatgaagtggatgctacctccaagaaagagaaaatatttagttttgtctctcaacaatttagggaattaaaattttcctttaacgaaccaattcaagagatatttcaaagtaggcagacaaagacttgttaatcagcaggaaacagaaggcacaaacaaactgagtaaaagtttggactcaggaatttagtaaatggttttataactccaaaagctggtacaaataaaaaagttcacaacacaggtaaatctatggacagcaactatacagcaggaagaaaaggagtttgatactactagtctgagacaattttatgcttctgccctcttgtagtctttatacttctatagaaatgttccagctgaacagaatcagaatgcagtccatggtttttaaaaaccgatattcctctacaccttccccaaattacagactcattttgttggatatgccatctaaacattgtgccaattcatttcctatgagcttaggtctctgaaaccaatcttcaacaaacaggagccttaagttacacggggtgagcatccctaaatccaaaatctgaaactttttaagtatcaacatgacaccacaagtggaaaattccagacttgacctcatgatgttaaacagttaaaactctgtttcatgcaaaaaattatttaaaatgctgtataggtccagtgtggtggctcatgcctgcaatcccagcactttgggaggctgaggcgggcagattgcttgagtccaggaatttgagaccaatctgggcaacatagtgaaatcccatctataccccccaacaaaatatacaaaaattagctaggcatggtggtacgttgtctgtagtcccagttactcgggacactgaggtgggaggatcacctgagcccgggaagttgaggctgcaatgagccatgatcataccactgcactccagcctaagtgacagagtgagattctgtctcaaaaaataaatgaagttttgtataaaattaccctcagaatatgtgtttaaggtatatgtgaaacatacataaatttcatgtttagacttggctcccatccccaagatagctcattatgtatatgcaaatattcgagaaaaacaaattgaaacccaaaacacttctggtcccaaccatttcgaataagggatattcaacctacagtttataaccaaccattcaattttctaacactttaaggagaatggttccagccagccacagatctgtcctccccgctgtggaaagcaaatcatttatgaaactaagttgtatatgcctgatactgacctcagaaaacaaatggaccatacaactaatggactttagttggctacttcactgaaattatttttatggtctcacaaagagacacattcaaaagatactttctatctttcccaagaacaattatcatgtctgttttatgatatagaactctgaggcctcaatcattcatttattggtgcatagaactgtatgcagatctgttttctaaggaagattctagcactgaatcataagaaaattccttagcccatctatatgctgaggtgagttgtctattttgcatacctattttggttaggcttgttttttttttaaccctattctccctgctcaatggattattcaaagcataagaatcccctcccactcccgcactgccttaactggcaatgaataaatttgcatttcaaagcaggtatgacttcaatttcttagtgaatagaaactataaaggaattctggaaaacacattgatagtcaactacaagtaagtaataaagaaatgtgcagtcactatcaatacaactttttatttaatatatccaaagacctctaaacactaatgaggtgactttttacatggtaataaatcactgtgtggtaaataagaacctcaaaagaaataaatacaagctatgatgcaagcaaagacaataacagtggggtaaacagtgactggcctaattcttaagggattctaactaataatgtagaaaaccacaaatttaagctgagagaggtctcttccaagaactttacaagaccagtgctctaacccctgagctatggagcccttgtgtcttcttccaagaactttaacactggtatttggcagctcagctttagcatgtcagcagagtcctcctcttataaaaccaggaaatgaagcaaatttcagatttgttgtttttcattaactgtgcctccatcctgcatccagcatccaggaagtatatatacaatcactaatctaaaccaaacctctcttgcctctttgcttagatctgacaaacactgactcaccttgacccaagtatgtcaggaagcaccacacaggaggactgtggagcttgagacctgaggcacacaattccacttagtttctagaaactgaaatgctaagtgtttcagtgagtttatccaattcttagtaagcttttgttcagtttctgatctttctgcctagccttgaaagtcacataaggaaactggcctgttctgtaagcctttgaaaattagatgatgctaagaaacatcaagagtccatatgtcttggtaactaggtgttatactggaacaaagcagtataacacctagagctaagcaggaaaagatactgacttgtggaaagttctaataagaaaattaatgtgttatactttttacaagcgtatgattatctttgtaagattacccaaatttacctataatgccaggacaagctattattcacattgcctgtgactgctattctgatatatataaaggagaagacagtatgtgctacacagctgaaatgcattagctttttaaaagtgaaggaaaaaaaagtgaagaaaaagttcaaagaagattctctgcagccatcctagttggatgacagaacagctgctttaccatctcaatgtgtaacaaatatttccattccttgattgctatgaaactcactttcaaaacaaagttgtcccttaaaaggagaatggtggaggggaatgattcaaacattcagcattcaagcaagaggagaaaatatattaagagataagaatggtcatcgcaagtcaatgaaccaaggatattttaaacaaaattatctgtaaatgaaaaaaaaaaatttatgtacccaggactggggactggagtagaacagtcataattcaggtgagtaagaatccagtgccttttaaaaatagctcatttgcattgggggagcggggagaggtgaaagaggaaaggataactttaatctgtttattggaaaaactaattactgtatgaacttcagactattttatattatgtgaaaggttaatttggtttgaaagcctatttttttggtacttctcggcttacttggagattacgtgtctccaaactactaaaaagaactttctacttcagtcagcaaagtatggatttctcagtaacataaaaactgttaactctaagaaaaataacttctattggctgggcgcagtggctcacacctgtaatcccagcactttgggaggccgagggggcagatcacctgaggttgggagttcaagaccagcctgaccaacatggagaaacctcatctctattaaaaatacaaaattagccgggcgtggtggcacatgcctgtaaccccagctactcgggagctgaggcaggagaatctcttgaacccagaaggcagaggtgcggtgagccaagatggcgccactgcactccagcctgggcaacaagaacaaaactccgtcaaaaaaaagaaaaagaaaaagaataagaacttatatttctattataaattctaatttaaagaattaatccttatatttctggttttatctttccccatttcttattcaaaagcaggtaagaagaaactctgaagtattcttagatgaaagacttctcataaatcctttcaaccatataacccagcattagaggggctagaaaaccgattatctttttgaactttctccactagggagtagtaaataaggaaaaaataggaataccctctaataatggcatgagaaagtaggagagagggttgtactttaaaaaatgtgtacttttaaaaaaactcatcttctaaaacacaatgtcccctgaagttgcatgaaaaacctcaaggtggtttaaaaacacttgtaaaaaagaagaatctttcaattactagtgagattgaatctatctgaaccagaattactagagtcttaaaaacactgacacttaaaaataactatgtttgtcaatattcctaattggctaatcttaatttttgatgcatgtgggaactcactatagtaagataaaggagtttctgacactcaaggattttttttgtttgttttttaaggcttttttgtaaaggcatgaagaagcggcttagtgtttggtcctaaaaggcaaaagaatgtaagaaagaattaggcctgttaattaatgagtctatttggaaaccttgtcaaataatctcagaaacaatagttctcagaagactagctacatcagaattatctgagggtatcttaatgtaaacaaaaccagcattcaagtttattaggttcctcaaaggagggagtacttaacaaggctttggtgaaagagctcctaagaagagaggagttgtgtgtgtagtagaattaatttgaggcaaatagcacatgtagaggtaacagatggcagactaagaaactgagtatataataataaagtactacactgaatatttcataaataaaacttttcttgtgttaaggatgttttttaggacagattctctgaagtttaataactaagacaaatgtttgctcttgaattttaagcttgctaaatactgctaaactgcttccttaaaggattacactaacttgctacataccgccagcaagtatgaaaacaattttattctaccctttactctccccttcagtattgcatttgttttataaaactctgcagattcagaaactgtttcaaaatcttaaactggtaattattttactgagctgcacttttttgcctattttgttttttatccttaagtaactttcataaacggtttatttttaataagctataaacatttcaaaattttttcaaactttataacgatagtgctttaaagttaaagaagctgtacattttcatataattgaatgtttaatttctttgtgattccttttaaattcagaaattcttcctttctccagagagctgatacccaacattgaaaaaaaacatttttttggttatattttaaaaataggccaggcgcagtggctcacgcctgtaatcccagcactttgggaggctgaggcaggcgatcaccctgaggtcaggagttcgagaccagcctggccaacatggcaaaacccgtctctactaaaaatacaaaaattggccgggtgtggaggctcatgcctgtaatcccagcactttgggaggccgaggtgggtggatcacgaggtcaggagatcaagaccatcctggctaacacagtgaaaccccgtctctactaaaaatacaaaaaattagccgagcgaggtggcgggcgcctgtagtcccagctacgcgggaggctgaggcaggagaatggtgtgaaccctgggaggtggagcttgcagtgagccgaagttgcgaaactgcactccagcctgggcgacagcaagactccgtctcaaaataaataaataaataaacaaaaataaaaataaaaatacaaaaatcagctgggcatggtggcgcgcctgtaatcccagctactagggaggctgagggcaggagaattgcttgaacccaggaggcagaggatgcagtgagcctagatcacgccactgcactccagcctgggcaacagagcgagacttcatctcaaaaaataaataaaaaataaataaatacaaatactgaacccacaagaaatattttatgcagtgaaaatattccttctccaaaggattacagattttccaagatgattacttactaaataatccttccccttatcactgatttgtaatgccttatcatatattcaaatgttatattcaactgggcctaaataagaggaactgtatttcaatgatctgttcttctattagtatttttagtgtcctgtctggtagattaattctccattacctttatggctcaaaattcaaactttgttcttctcatctactatttttttcccaaacttttcaaacacctatctcccttcccacccccacaatcattcactggatttgtaatgaactccatcgaacctacagtttgtaaaatacacgtatttttatttcacagctcttaaagttttgccattttcttcttcttctaagtcatatgtatttcttattgatattaccccaaattttcacatttctgtctctcaggaacagcatatttctttgttttcttttttcttttctttttttttttttttgagacggaggcttgctctgtcgcccaggctggagtgcagtggcgcgatctccgctcactatgagctccgcctcctgggttcatgccattctcctgactcggcctcccgagtaactgggactacaggcgcctgccaccacgcccggctaattttttgtatttttagtagagacagggtttcaccgtgttagccaggatggtctcaatctcctggtctcgtgatccacccacctcagcctcccaaagtgctgggattacaggcatgagccaccacgcccggccacttctttgtgttttctaatttttaactactggcatagttctattgcactgactcgggtcatcttttcgttcaacacctggggaacttttaagtttttaattcactcaatttaggtgaggatacagaaggcttcacactggatagaagatacggggagaaggtcatagttcaattagtttttgctagttctaatttattatcaggttaacattaaaaaaaaaaaaaaacccacacacataaaaaaccccaaaggcaatactcttatgtatacaaaaatcacaggggatggtttttgtttacttgcttcaaaaactacattgaagaatacagactttttgtttttaatttcaaataactcttcagggaagcattaaggttagtttagaaatactagcagctctgaattatcattaccatcccaacaaatacaatagaaatttaaaattagagagtactttattaatacaactacaatcagcagaatctcacttttttttttttaagggataatgattagaatagagagctttctaatttaatgaggtaccccttactgtgactcccgcctcctcccggccatgaatactaccagaactaaatgaacaaacaaggcatcaaaacttctatttcaaacaacagacttcccagtaactagttcttttttttttttcctttggagatagagtctcattccatcactgtcacccaggctggagtagagtagcgtgatctcagctcacttcaaccttcgccaccagggttcaagtgattctcatgcatcagcctccagtggaattagctgcaagccaccacgcccatctaatttttgtacttttagtagagacgaagtttcaccatgttgaccaagctagtcttgaactcctgacctcaagtgatctgcccacctctgcctcccaaagtgctgggattacaggcgtaggccaccatgcctgggctcccagtaaatagttctaatttgatctaaagattattaacaacttcttttctgtaatacaatggtagagtctccgaatgtcaaagtaattttacattttacttttatgatggctatgattttgtttgccccattaaaaatctggtgtagtgctgggcgtggtggctcacgcctgtaatcccagaactttgggatgcccaggtgggcagatcacctgaggtcaggagttcaagaccagactcatcaacacacagaaaccccatctctactaaaaatacaaaattagctgggtgtggttgcacatgcctgtaatctcagctacttgggaagctgaggaaggacaatcgcttgaacccaagaggcagaggttgtggtgagccaagaataacaccattgcactccagcctgggcaacaagagcaaaactccatctcaaaaaaaaaaaaaaaaacaaaaaaaactagggtaattcatccattaaatatattagaatattttaaagaattttcttcatataacataaatataacaccaattatagcttctcttctttttcccaagtcttatagcaaatatatataatcttcatatcaaaatgctaaaaagttattacaaattcaaactgcttaccatgataccaccattttgttttctttggattcttgttacatgttcgcacataaaaagaattatccggtggtcgtctctgaaacaaaaaataatttaaataggttgaaaaacagaaaaactgagagggtgacagttttaataaaagcttaagaaaaattaacagaatgcataaaaaacaatataaacatgaatagtatatctaaaagaataaaaactataaatgtattccaggaaatgtgtatgcttaacacctaaatttaaaaaaggaataataagcgtgtttgagtgtggtctgtgttaggttctagcctggccaacatggtgaaacccagtctctactaaaaatacaaaaaaattagctgggcatggtggtgcgtgcctgtaatcccagctacttgggaggctgaggcaggagaattgattgaacccgggaggcagaggttgcagtgagccaagattgtgacattgcactccagcctgacaacagagcgagactctcgtctcaaaacaaacaaacaaaaaattaaataaattataaagggaatgaaaaaggactgatgagaaaagtcaaattcacataataatttaaacatagccgggcgcagtggtgggcatctgtaatctcaggtacttggaaggctgaagcaggagaattgcttgaacccagaaggtggaggttgcagtgagccgagatggtgccactgcactccagcttgggtgacagagtgagactccatctcaaaaaataaataaataataaaacaaagggccaggcgcggtggctcacgcctgtaatcccagcactttgggaggccgaggcgggtggatcacgaggccaggagatcgagaccatcctggctaacacggtgaaaccctgtctgctaaaaatacaaaaaaaaaaaaaaaaaaaattagccgggcgtgttggcgggcgcctgtagtcccagctaactcaggaggctgaggcaggagaatggcgtgagactgggaggcggagcttgcaatgagccgagattgcgccactgcactccagcctgcgtgacagaaccagacttcgtctcaaaacaaaacagaaaagtctactaaactagatttgttgggagaagtatagcaatgtacaaacctccacaaagaactgtttttactgtaatagaataccatcaaagatagaccagaagattcagtttctaaacaatatttaagagaaaaaatgggaaaaatatatattggcatttctactataattggcctttctgctgaacatatgccctgactagaacaatatatgagaaatatatggcagctccgcaagggagctaccgcagataaagtgatgccaacaacactgaagatatattatggaagagacttttcctgaaatttgttgcatactgcctagacaaaagaaaatgttaccctctacaaagacttggaaacatcaaatttatattaaagctatattaaagtttatagatactatgatagatatccttatcctttagtctcctttatgcctttcggaatcattccaataacttgattattttcctatcattaaatattgtatagtgtatatgcaggatttattttcagacttaaatctgcttagctaagctaatgaaaatgagagattaagggaatcctctcctctacctgaggctaatgaaaataagtgaatttggtatgacatcatttaaggaaagtctaaccagaaagcaatcgtgagtaggactctgtgatagcaggaaggaaaacagttagtccatttggcacttctaaaactcatatatgtaactatcagtctagttgagcctcacaatgctcttatgtgttaatattagtaatttcatttaacaaaaagaaacattagagcataagacagtcaagacatttaggtattccaagtcaatctgtggacacaatttgagaaaattcctaaaaaatgaatattatgaaattagatgcctgactacttcaaggaagggatgattctacaaagttaaatctatgttcatatggaattggtactactagagcagatactttcacaaactcattttatgtatatgttgattagaacccaagaatcatcagaaaagtcttcaaaaaatacatatttagaaaaaagaaatactcaattctatttgcttaaatcatttatctccctgacaaatgatcagggagatacagttcttggaaaagaaactatacaaaagaagtcttacgaaattgttttaggaatgggatacaaactgaaaagtttgaacaatgtaaatatattacaaaggcatgcaaataaagtggaatttactgaaagtcctgtgatctcaatatcagaaattatctttaatccactacaatctaatgacatactggatttaaataccttcagtttatggaaccactcctgactgtgtaaaaggaaattggaatagaagaattatgactaaagtcccaaacacctaaagtaaaatatttaatagtagtagaattaacaaagtaaagcccatagaaccatgtccactacggaataaaatttacccgttttaataataataaaacgtgtagatgggtatttaaaatacttttcttttttcttttttgagacagagtcttgctctattacccaggttggagtgcagtggcgtgatatcagcttactgcaacttcagcctctgggtttaagcaagtcttgtgcatcaacctcccaagtagctgggactacaggcatgcgccaccacgcccagctaatttttctatttttagtaaacagggtttagccattttgcctaggctgctcttgaactcctggcctcaagtgctccacccttctcggcctcccaaagtagtaggattacaggcgtgagccactgcacctggcctaaaacactttttaaggtttctttggagcttagatctctctaatgccagatcgtctcaatgccaaggcaaatttcctcttcatctttgtaacttatcacttagcacagtaaaagtagcacatactaggtacctagtaaatgttttttgaattttatcgtatttcatggaaatcttgatttctgtattatcatcttggttaaatattatacaactattacagtaaaaacatagtttattagtgctttaaatggaatgattagtcttatactaagtgtacaagaaacactagtagcagacaactagaatgtaaggggaatggtgagggttagaggaagatgaaggaagtacacagaatatagtcattctctagtttttaataataaatcattatatttaaatgtaaataaaatctaataatcatgaggcacatgcaagactatgtacagatatcgctgacattaatctcttaataactttcttattaaatactgttgttaccgtctcacctttctatagtctttaagcgtaacaggaacatagaaggccttgtacccacaaactgctttgccctacacataaaagtttaaaacgtgtgtgtgtgttgggggtgggtgagaggagaaaatataacagcaataagcaacaaatgagtaaaaaaacaaaacaaaaccaatttaacctattatttcacatgctgtggcttagagtgcttcagattctaaataacctatcattaaaaaatgaactattatcttaaaagttctccaaatactaatttaataaaaatgacaatcagttcaatttggagaaaaggaaagaaaactgtaaaacacaaataactccctaacctctagggcaaagctgtttctcctttaaacagaatgcaaaaggaaaaccctcatagggatttaagaggggttttaaaatgtagaaatacataaatgttatgctatactaacccttaagcaggaatgacaagagtgtcagaagtgtacagaggattcagatacatttaaagggtatcctaaatttatatgtatattttaaatttatttcattattattttcttgagatggagtctcgctctgtcacccaggctgtagtgtagtggcatgatcttggctcactgcaacctcctgggttcaagcaattctcctacctcagtctcctgagtagctgggattacaggcatataccatcacacccagttaatttttgtatttttagtagagacagggtttcaccatgttggccagctggtctcgaactcctgaccgcaggtgattcacctgcctaggccttctaaagtgctgggattacaggtgtaagccaccgtgcccagcctacattttaagtttaattaagtgattttttttctttttgttttttttccccccacttccatcagacatagaatctgtggattaataaaggagaacaggaagaaacgccctgaaaattcgactggtaaactggtcttcctccttcaacctaatcattaggacagggaagctctggttcctgaaaaattccctgaaacaggttgatcgggtgggagctggcagaggggagaaggaagctatgatgcacttttctgaggctttccactgtgaaatctacaaaaagaatttcttgtatacttttacctgtgcatgcttttgggaataaaatcagctttaagaaaataccgtacatttcctgtttaaaagaatataaaacagtaagtctggcttctaccccattcaacatgtaaaacttctatttggaatgaaaggtatcaaaataactttccaatttattactaaacatgaaattccctataattttcaaataaaaagcataaatccttcctccaaataaaaataattacatattaaaattatttatctacctaactgaaagaagagatattatctggaataattctgaaaagtcttaccttttccttgcagctggaaagcatgctaataatgctaagacaaactgattggactgagagcgctggggaccagtcttctgttagaatggataaacagatatgaccattgctataaacatgaggatgaacaggaatattttcaccagtaaacatgacctaagagagaataaaattccattaaaactcaaatattctctactaccaaaaactaaaatattctccacatataacaaatattgattataaaaaaacaaaaaaccaccaaaatcagtgccaggaacatgataaacaactgcttatttgtttactctcattaactcagtaagtattggtttcactgaacgaataaccacatagtagggaaaagatgccaaattattttttatttcggttatttttgataaattctccttaaaaattctaaactacgtattttttactagtgaaagacaactacatttataagaatgatttttcagattttgctcattgctctctgcatataaaaatcaagtatgataaaattccaaacaaaaatattcaattttgggaaaatatgaatgacaggtggtaggaacattcctcctactactacctgttaacaatgttagctctaaggcacatgtgcaaagggaaatgactgttatatattccacctcctctaaacttacacatccattatgatgggtacaagttactagctgttaatcagtaaataactatgtgcctagacgaaaaatacaaaagttgaccaagtctcccaatttgcagttttactctcctttcccttttactcaattcttctgtaacactgtttttcctttctctatcatgtctcagcaatgttttgaatggtaataaatctattatttccttcctttgctctaataattcaacaaatatcttaaagtagtttttcttaaacttatttacctaagcaaataggcaggagaataaattcatatatcctgaggaatctgtaagcatagtccaaagttgctcgaagaaagcagaagtcttatgtttacactgtgtactatatttattctacaggttagcagtaattcctaattcctgacctcgccaaaaatcaaacaaaaaaacaaaagaacacatagttggaagatctgcttaaaaatacaaattcaagtgtcctgctttcacagattctaatttagtaagtataattagatttttataaaacccatcagatataaaccaacaattcctaaatcagatttacagtatctcagccctgcaaactgcctcatacccaagtacaacagaatatcagtaaggagaaatcttaccttaagttatagcagaaactgataaaagatatacagtattgctttaggcatacccttttttctctttatagagcagaaaaaagaaccagtgaggtaaatatgaatagaataaggtatgctatagtttaatatggaatatgttataggaaattaccataagctaagttttatatatattttaaatatctagctatgaatctgattttgttacaatgttacaattttacaaagatttacatgttaataaagcagtctttcatatgagtagagtcttctaatatttcaaatatattaactaacatatgggacacatttccttggctaagactagataagacagcaaaaggcatttttttcccaaaggaacgattttccatacttgcatctatttcttttttttctttaaattctggacatcaactctccattcccactaataaaaaaaaaaaaaaaagctaaaaaacaaaagtaaagtctcaaaataagagaaatcaagtcacttatcctacctaattgcagaagactccctgaaaggactttgattttgtaatggctacgctctatgcatgacatttatctcaattacatctatcggtgctagtaccctcttcattactttttgctaaaaaaaagtattgctctgtaaaagaaaacaaatgcttacatggtcttatagttccacactggagtctgtccacaactgttttttaatgaaattttatttttcataaatatgaactatagtttattacatcatatgcatctgatactcccatgtgttgtagatgtacagaatgggagtttacaaatcttacggacatctaccttgaggtattcattttgccataaaaagccatttgaccagtaggatattttcattaaaacacaagcaatacccaagagtttcttctttggccacaattatttttttaaaagatatttttcggtgtggctcatgcctgtaatcccagcactttggcaggccgaggtgggtggatcacctgaggtcagcagtttgagaccagcctggccaacatggcgaaaacccgtctctactaaaaaatacaaaaaattagctgggagcggtggcacgtgcctgtcattccagctatttgggaggctgaggcaggagaattgcttgaacccgggaggcagaggttgcagtgagctgagatcgcaccaccgcactccagcctgggcgacaagagcgaaactcggccttaaaaaaaaaaaaaaagatatttttcccagtaaggtctctatcaagaagtcaagaagaatagtgatctgaaagtgccacaaaaaaaaaaaaaaaaaaaaaaaaaagaacaactgccaaattatcttctttggcaaaactgaatcaccaacctttaaagaaaatagcaacacgaaggttactacatcatgtttcacccagccaattcagagcacaaggagaacagtatttttcctaaagagaaatggttataaactaaatcacttggcctgagagccagtaagtaggcatgaaccaaaaggtactcaggagagaagagaaagaaaagcgatgagtagcagtagaaaacacctacagcagatgcagcagatattctgtaagcaaagagaaccagtaatgaagaagacagaaacaactgtgaagtagaagaggactgagataaaaataattcagatctcaataacctttaaataaaacagcaggggctttttaacatactgcatgcagggcaaatgcagccaccctaaaacttttagcaaccaaaaccaggggaattgcatgtaataggtaacccttagggcctaacctgccagatacagaattttagaagtttgtctaaacatataaagggtgaatttacatgccagaggtgaatttacatgccagaggtgaatttctgaaataaaaggaaatttttttcaatagttcattcacataaggggcaaataagcatagtttccacagatggttttttttttttctttccccagatagagctttgctcttgttgcccaggctggagtgcaatggtacgaccttggctcactgcaatccccgcctcccaggttcaagtgattctcctgcctcagcctccacctgccaccacacccagctaattttttgtatttttagtagagatggggttttaccacgttggccaagctggtctcgaactcctgacctcaggtgatccacccacctcagcctcccaaagtgctggggttacaggcatgagtcactgcacccggcccacagattgttctaatgtaaactttgctaatctggttctctgcatggggaaagtaaccaaggcagaatttcttcaactgcatactgttagccatcctcatttatttaatactcactacaagccaaaggagaaagtgaatgtttcagttttttaactcagtcaagtagtttctacaaacaagaaattattaagttgtttctaaggttcaaaaaaatttttttggagtttcaagtagctgacaaaactgactagaaccgatgtgacaaaacaactgaacacaataaatttgaaaccatagcaactttgcgaatgtattcaaaatagtcatatgaacagccaacgatggagaccacggacattcctcgctgcgtaaattacactaagtaaaatggaattacagatttttaaagaacgatttgatggaaatacagttttagaaaaggatcttagaccgaatgtacatgaatcaagtttgaagttgcattagaaacagtctttttttttgagatggagtctcgcactgttgcccaggctggagtgcaatggcccgatctctgctcactgcaagctccatctcctgggttcatatgattctcctgcctcagcctcccaagtagctgggattacaggcgcacaccaccacgcctggctaattttttgtatttttagtagagatggggttttactatatgttggccagactggtctcaaactcctgaccttgtgatccgcccgcctcggcttcccagagtgctgggattacaggcgtgagccactgcacccagactggaagcagtctttaattattactacctttccaaacatctcccgagcagtatggcttattcaaaagcaagtgagagctaagagagaaataattatgctcagggtatgtatcattttggagataagtatgtttatcccacaaccaacctgaaattttaagcaggccaatctctgggtaatttttgggtactgtgaatgtagtgcctttcataaaactactaaaatctacactgaaagccaccatagtgataaaaataaaaaataagaatgaacaggggttggggatggtgactcacacctgtaatcctagcactttgggaggtcaatgtgggaggatcacttgagccctggagctcaagaccagcctgggtaacaaagtaagatcccatctctaaaaaaaatagtaactagccgcatgtggtggcatgctcctgtagtcccagctactcaggaagctaaggtgagaggattgtttgagccaggagtctgaggttgcagttgagctacgatagcccatggcacttcagcctgggcaacagagtgagaccctgtcttggaaaaaaaacaaaaaacaaaaaacctcactcaaagttggtgtagtcagagaaatagctcaatattatagctaccaatatttataatgacttaataaaaatcaataattgaaagtagacttgtaattgtacacttctatatgtttatacagtttaccaaaaacctctgcattattgctaagaacaaaataaaggatgggtatcaggtacctttctaatatgaaattcaagaattttcaaacatcaagcccaatactgaaaggccttatggtactgagatcttaccacgaaggaggcacaactactgttcagactagagttgcagaggtagttagaaagtctataacctaacatggtgtcaagctaggtcaaaacacagtgtatataaacgagcagtaaaaaacagaatataattataaaagccaatctacaatatggataccaaggtttttccagggacagtatgaggaaaatatgttctctgattacaattattataagatagtatttaatgcagacaacagtacttaatgtgtaactacataaactgaacatacaagcaatcagtttattgttgtaatggaaactaaatcagatatttatgtataacatacaatataggtagtctaccataaacggtatttgacaaaaatgactggagattggaatcttagcatagctttccattcaattctccctttttagtcctctcatacacagcaagcatccataagtgttccctgatactctgtaataacgagtaccatgcagctatagtgcaaagacaaaattattggacacaacgaaactaaacttggattgtcttggatggtaatcattctcttccctttatactctatgttcttttagcctactagtctaatcctctatcttccttccccttgacccccaaggcttcagtgaatagggttcactgttaaccttcttgtcaggtgtccaagacgcttgtcaatttaaggcaataaaaactgttattcaaagactttggaaagcttgaacatcacccatgaaagaggatggaaaatcagaccaggaaaaaaagacaagatgaggacatcacgaacataggttctggatctctgcaaagaatgaattttgagcaacagaaaagggtccgtggtaaggaggcatgaataggaggggggaatgaggatgaagaggaaggtaattactcttttgcctcagtacttttaaagctttacaatcaaggcaattgtactttcagcaccactcttagcaacaaaatggcttctaatcaaagagacactgtccccttccctctaaaataaacattttccctatttctaaaatactgaaaacgtcttcatcaaaaattagctaaaagtctctaaaacaaggccgggcacggaggctcaagcctgtaatcccagcagtttgggaggccgaggtgggcggatcactggggggttaggagttccagaccagcctggccaacatggcaaaaccttgtctctaacaaaaatacaaaaataagccaggctttgtggtgcgcgcctgtaatcccagctactgtggaggctgaggcaggagaatcgtttgaacccgggaggcggaggttgcagtgagccaagattgcgccacttcactccagcctgggcaacagagtgagactctgtctcaataaaaagtgcccaggcatggtggctcacacctataatcccagaactctgggaggctgaggcgggcagatcacaaggtcaggagtttgagaccagcctggccaacatggtgaaaccccatttctaactaaagatacaaaaaaaattagctgggtgtggtggtgcacgcttgtaatcccagctactcaggaggctgaggcaggagaatcacttgaacccagaaggcggaggttgcgatgagccaagatcatgccactgcactacagcctgggtgacagggcgcaactccatctcaaaaataataatgataattaataaatcaatgtaatagatgtatttcagatttctttcactcaaatagaatgctttaacagaggaaaggggtacaaatactggatatgtaaaggaatggaagaactttctcttggatatagaaaggaaaagtagtaatagagtcaagatactaagcttgaggacttcagaggttttttttgttttgttttgagatggagtctcgttctgtcgccaggctggagtgcagtggcatgatcttgactctctgcaacctccatcttccaggttcaagcaattctcctgcctcagcctgctgaattgctgggactacaggtgcacaccaccatgcccagctaatttttgcatttttagtatgggtttcaccatgttggccaggttggtctcaaactcctgacctcaagtgatctgcctgccttggcctcccaaagtgctgggattagaggcatgagccaccacgcccagttgtggacttcagagttttgatggagatgggccatccctcctaatacctatgatagaaacgtcaaacttctttcacactgcaagaccctttttgataagccccaaaataaccttccactctcatctcctgctgtaatcccccatgtatcgacacataaaactacaagagcccatgctcacaaatgtaaggaggccaagtcctttcacaccttgccctatacttttcacataaactctttttgtcctttaaggcccagttctaccagttcaaataggtttttctttgcccccttagaatattctaaattggttgctttcccttttgcccccaaagcatacaattcacacttcagttgtctgtacagttgcatatgccaaaaatcatggagtcttccttgactcctcccctccttcaatcatactccaaattaatccattagcaaatcctgttgatttcaacctttaaaacaggtccaaaacatgaccaccttccaaaacgtccactgctacccttctggtgcaagtcaccatcatctctcacctgggttactttaacggcctatctgatctccctgcacctttatgccctgaacggtttatatgccacacaacagccagactgttccttttaactttaaataggactatatcgttcctctgctcaaaaccttccaaaggcttccccatctcactaagagtaaaaagtcaaaattcttacaaggggctataaatgtcctatataatctgtgatgaccgctccagcccaaatgatctctctgactaatacagtttggatgtttgtcccctccaaatctcatgttgaaatgtaacccccaatgttggaggtggggcctggtgggaggtgtgtgggtcactctgggtgtgtgctctcatgaatggcttggtgatgtcctcgacagtgaatgagttctcttgagatctggttgtttcaaaatgtgtggcacctcgccactgactcttgttcccactctcgccatgtgagacactgctccctcttcaccttctgccatgatggtaagcgtcctgaggccaacaccagaagcagatggtggcactatgcttcttgtacagcctgcagaactgtgagccaattaaacctcttttctttataaattacccagcctcaggtctttatagcagtacaaaaatggcctaatacactgacctaagccttacactccccttcctgtttatacaccactccagggacccgtcctacatattccagatttagagcctttgcattttgtcttcatctgttctttctctcaaccctttcaaatggcttactcctgcacatctttcagatctctcctccaatgtcaccttctcagtgaaatctttcccagtgactctatccaatatttcaacaccctcatctccccttctgtacttttccctcaccatcttccatactatatgtattctactcgttgcttactgtctctccccacaagaatgcaaactccatataagcagggtttttgttgctgttgcagttttggtcatcattgaatcaccagcacccagcacagtgtctgtcccatgacacatcctcaagaaatacggaatgaatatttacctatccaaatactaaacagattataaactgtttaaaggcaggcccaatgccttttaaaactctgtactctctcccctctctcaagaaacagtatttgatacataattcatgcccaatacatgttgaattaaccaaccatttacctgtatcctagcataaaaaagcagaatatgtacatagaaagctattttctgtatggctgacagtaagtgtacattagcggcaagcagtgatgaaaagatgcctcatctctgtttccatattaacagacaaattgtttgttgttattctttcttttaaggcaaatgactgagccaaacatattttagagaggtaactttttcattataaggcaggacacaacatgagacataaaatataactggcaggaagaaaaacacaacaaaccataatggtgtgtgacagtcttactgatctcatttacaggtacaaaagcagtaatttcacaatgagattcatctattctagaaatattttccaaattctactcttgtaactagtgataaactcagtactgttcattgcatagaaagatgaaagacttttctttcttttttttattagagatggggttgccctacgttgcccaggctggtcccaaaactcctgggctgccttggcctctcaaagtgcttggattacaggcatgagtaccatgcccagccagaaagatgaaagactaatttaggtaacaagtgctaatgctacagagtttcatcaaataaaattttgggggaattttactgccctagaggactggttctagccactttcccagggcagtggatctctgcaaagtttcagttattggaaaaatcttgaagtctataagcacatcaagcattgatgtttgacccattataattatgttaaaactatatagattatgtataaatacattttaaaaaattttaacgtattactggcctcagagtagttctgccattttcccaatcaatggatattagaatatacaacctctatgccatgtgagggactacagaattaactgatattaaaaaggaatcctcactgggcgtgcctatgatcccagtactttgacaggccgaggcgagcagatcactttaggacaggagttcaagaccagctggaccaacatggtgaaaccttgtttctaccaaaaatacaaaaaaaaataagccaggcatggtggtgcatacctgtagttgcagctactcagagaggctgaggtgggagaatggtttaagcccaggaggcagaggttgcagtgagcagagatcacaccactgcactccagcctgggcaacagagcgagactctgtctcaaaaaaataaaaaacaaacaaacaaacaaacaaacaaacaaaaaaacaaaataaaaaaaccaagccaggcatggcggcagatggctgtagtccctgctactctggaggctgaggtggaaggatcacttgagcccaggagttggaggctgcagtgagctatgattacaccacagcataggtagatgacaaagggagactctgtctccgcacccccaccccaccaaaaagtaaattaaaaaaggaatccttatatttcaaaaagagtgagaataactgacctagagctttcaaaggtaccattcattccacatataatctttcactttcagagagaaaattactacatagataaataggcattttttccacaccggtactcgcatctaattggcagtatggcaaaggaggaaaggaaagacttgggtttgggtcttgactgtcctataaactaggtattaaaacgtgaacaaggcacttcacttctacaagtttcaatttcttcacatataaaatgaggatgaatctacctcccctaaccacttcattaaaagatgttagaaaacaaaatcagaatggaagttaaattatgaagtactatatagaaatattaccatacagaatgcatgcaggtgcagaaaaagttaagtttggatgtgactatacagggacttgaatgccaggctaaaaacttgattccataggaaataaacattaagaggttttactgtcagggggtgaggaattctggggatggtggagtgagacagagtgtgtgtgtggtgggggggtggagtggggtgtgggagtgtgtgtgtggggggggggggatgtgtgtgcatgtccatgtgtgtggtatgtaaccagtgagataactgtgccttcaaacaaatctattggcaccgtgaaaggatgtaggaattcaaagaactaaaggctactgtaatggttcaaataaaagataaaaacctggactaggccaggcatggtggctcacacatgtaatcccagcactttgggaggccaaggaggtgggctgatcgcttgagcccaggagctcgagactagtctgggcaacatggcaagaccccatctctacaaaaaatataaaaattagctgggtgtgccatcagatggccaaatcattatttactggaccagaccttttcaaaactatcaagcagatagtcaaggcctgtaaagtgtgccaaagaaataatcccctgcactgcaggccatacatttcaatccctctatctttaacctccttgttaagtttgtctcttccagaattgaagctgtaaaactacaaatcgttcttcaaatggagccccagacagtccatgactaaaatctaccacagacccctggaccggcctgctagcccatgctccaatgttaatgacattgaaggcacccctcctgaggaaatctcaactgcacaacccctactacgtcccaattcagcgggaagcagttagagtggttgtcggccaacctccccaacagcacttgggttttcctgttgagagggggcactgagagacaggactagctggatttcctaggccgacaaagaatccctaagcctagctgggaaggtgaccgcttccacctttaaacacagggcttgcaacttagctcacacctgaccaatcagatagtaaagagagctcactaaaatgctaattaggcaaaaacaggaggtaaagaaatagccaatcatctgttgcctgagagcacagagggagggacaacgatcaggaaataaacccagacattcgagctggcaacagcaaccccctttgggtcccctccctttgtatgggagctctgttttcactctattaaatcttgcaactgcaaaaaaaaaaaaaaaaaaaaaaaaaaaaaaaattagctgggtgtggtggcatgcacctgtagtcccagctgcttcggaggctgatatggtaggatcacttgagcccaggtggcagcagttgcagtgagccaagattgcaccactgcactccaacctgggtgacaaagcgagacgctgtctcaaaaaaaacaaaacaaaaacaaacaaacaaaaaaccagactacagcactgacattaagaaaagaatgggctacctttcaaatgtaggagggaggagtgtggaaaagagaaaaactgagcacaaaaatagacaggtggacagtaacccaggataaagaaaaacaaaatgttctttgttattggaaagatcaagtttagttgtgttaaatttgagatgtctggaggtactcaagtatttcaacaagggtgtgaaattaagccttaaaaaaagaagtgttcccagagctgtagatctgggagttagctgcttaaggtgactgaaggtgaaagaagagtgagaagagtaacacagtgctgaataaagaacctggataacaccaatgttagaagaacagacaaataaaatcagggaaggaggataaaatgaatttgaaataggacaatagggagaatttattacaaatgctgtaacttacagaaatattaaagaagaaattcaacataatgtttaagtttgatatttgatttagaattaaatattaaggaaagagtttagagaacacatttttgacttggtttcatgcttacagaaatattattttcctctggtgaaaaatctgtaagctcccagagtaagccttcccccaatatctccctagtcaaaagcttttgaattggtgtgaaatattcttccttcccataccatcattgaacttagttgaaggtagacaaataggctgatgatgaaaacagactgagatcctgttgtctccacacatttacagtcagaaatgatgctggccagccagaaagcaacaaaagtgatgacaatcttctggagagaagatgtttgttctttttattatagtctacaaatgcttattgtagacatctagaggtcacaatagcacataccctttcactttaacttttatgaaaatgataaaaataagtcctaaaagtcttggtagttttctgctcatatgaaaattttagaacttaaggagtcagtatccatttaaatctatgctttaaaacaattatctctttacttatagcatgatacaataactgactttatctcttctcttacataactaagaaaagattaagctgtgtttggtatattgtttaaagtgacaatgaaatatgattttcctccaaatagtacatttcagcacccaacaagcaaaattttcagtatctgggaaatatttcaggtatttggttgtattttccagaatagctcatttgctagcaatactagagagagctggcatcatgtcttaccattttagccaacggatctcacaagcctcaaattttaaaaatgaagtgctttgttataattctctgaagaataagtaattatagtaactcatttacttatcttaccaagccagaaacctggaagtcatcctagagtcttcctttctctaacctgattaatcatttactatagttaaatagctctcaaaaaacatttctctaccaccattatcccttgtctaagtattaagctattaactaaactcactgggcatcaaattataataatcagactttgtgctgatgtttagatatttaacatctgatgatgtactctgcccttcctgtactaaaaggctgcaaggacagcatgtcaatgcaaaatcatagtactccttccaacagagaacttttctcttcaccatgtgattctaccatctgacctaggagaagtgcctccagttattccaaaatgtcaacttctccgatggcctagagcagtggtccccaatctttttgacacaagggaccggtgtgatggaagacaatttttccatggatggggttggggattggatgatggttttgggatggaactgttccatctcagatcatcaggcattagattctcataaagagcgtgctatctagatccctcacatgtgcagttcacaataaggctcgtactcctatgagaatctaatgccatcgctgatctgacaggaggcagagctcaggcagtaatgctgctcacctcctgtgtggcccgactcctaacaggccatggaccagtactagtccacagcatgggggttggggacccctggcctagaggcctggttagatttctattcccttttctgttagcatttatggataagcaacaaatgaaacaattttagaagcaaaatgcagtaaagccctaatcccaataaagtgtaatgttcatatcttgattatatgacaaataagataatgaaataacaaatccatctacatacgtataactgatttatatgtttttactgagtcaaacatctctggcatttagctatctaaaaatacaaaaaaaaaaatttaaagcaaggcaattacctgaggagagtcaaaaggatatcgactactaaatttaaatagaagttgaaatttttccccttcatataaggtacctggtgcaccttccatgtctacaatccacctagaatagaaaaggcaaattaaaaacttaagataatagagactggggtaaggaggagaaaagaggacaccaagtacttcctatacactaagcactaggacaagagttggttatgtgtaacagcacatgccagcctcccaataactctcttactgttaattctcatgacctatccccttctctgacactcagcggtgaaataaccagatcaaggtcagacagctagcaaaagacagagccaggtctaaaaaagcaaactaaataaaacccaaggccgggtgtggtggctcacacctgtaatcccagaactttgggaggccaagacaggcagatcacgaggtcaggagtttaagaccagcctgaccaacatggtgaaaccggtctctactaaaaatacaaaaattagccgggcatggtggtgtgcacctgtaatcccagctactcaggaggctgaggcaggagaatcgcttgaacccgggaggcagaggttgcagtgagccaagatcatgccactgcactccagcctgggctacagggcaagactgtctcaaaataaacaaacaaacagacctcaaactaaggtgcactgacaccaaagcctgtgctcctcctaattgatttatactaccttattttttcaaagtaccatttctacaatgctgatattacgtattctatacataacatcaaacaaagcaactgcctctgattattactggtggaagccatggagaaatacgtatagacaatgaccacagagaaccgtagctgtcagacttatttttttcatcaacatcctagagaagattaacagggcaaggggagctaaattgacatcagtccacttactctgatgattaagcaaggctttgtggtgactttcctttatctctcactatgtttcaattgtttaataaagcccatttctatgccatctatgcaagcctttgttttcatatataacaatcataaacataaatgtgttatttacagtttatatactattcttgttattttctttaagatgggaagaataagggataatgacagcaaagataacagggcagcattagaagcaaaagtgaattgaagtcattaacaatgtgttcctaattatagctctgtcacttataattcttgtacacctgggcaattctcttgaacttttcagttattaaactttcttgtatttaaaatacaagaaaacaaaaggaagatagaaaatacagtgttgggattctagtcatcaccacgcatactatgaaccttggattatgtaaaataataaatgtacctattctctaaaagaaatcagctacagtatacagactcttaagagcatggctattcattttaagaatgcacgctgagtaccatacatggtaataaaagatacgaccacagacccaagagacaatattttatagtgaaattagacagttataactgaagttatactgaagtcgcagttatagttaatcttaactcattgtgtgaacaagttatgttatctctccagttttaactacctcaataataaaacagaagataatcacctcatagtgttgttggaaagataaatgaccctacatacgtaaaaaacctagcacattcctgactcagtcaatacatggtaaattaaatgcaatgcaaaagctgcatacaaaacaaaaaactatctctttatatattaggtccttcttaatcttcgaaattcctttcttatttttccacccacatccactaggcacagtgatattcccaggaaaaacggtggtctttcattctgtttatatggtaattttaggacacataacataaattaacatgtaacctatacaaacaagcacagcttttaaaaataaagagctaagcaagtatctcatcaatccttgtaatatctgcatgacatgcagatactgacacgaggtcaaaggcagcataactttcaacatggtgcgtggtactttcttttttttttggtacagagttttgctcttgttgcccaggctggagtgcaatggcgtgatctcggctcaccgcaacctccgcctcctgggttcaagtgattctcctgcctcagcctcccaagtagctgggattacaggcatgagccaccacacccggctaattttttgtatttttgtagagagggtgtttctccatgtttttcaggctggtctcgaactcccgaactcgggtgatctgcccgcctcggcgtcccaaagtgctgggattacaggtgtgaaccaccgcacctggcctgtgcatggtactttctaataatccttttgttttgagacagggtctcactctgtcacccaggctggagtaccgtggtgcaatcagggctcactgcagccttgacctcctgggctcaagtgactcccccacctcagactcccaagtagctgggaccacaggtgcacaccaccatgcccagccaacttttaatttttttctttttttcagtagagatgggatctccctatgttgcccagtccggtcttgaactcctgggctcaagggatcctcctgccccgcctcagcctctcaaagcattgagattacaggcatgagccaccatgccaggactaataagtttgtattagttaaaaaagttaagatatgttcattgtagaaacttcagaaaagtataaacaaaaatcacccagtgataaccactgttaaagtttttgggggtatatttcattctagtcattttgctgtttcctataccatcgaagcctatatgaaatggcagcccagtagctgcattttgtgcacacttaaattacatcaatttaaaccatcagggtttatgattccaatcacaagcatatgccccagagtaaggatgcaatgagactacacgtgttgttctctcaattagtctcagttctttaacacccgtgagtacctagtactctgtaattctaatgtttaagcattagaattttttttatttcttcacatatcatggttcttaatcaaagacacaaccatctattccactctggaggaaaaactggctttggtggatttattaaaagaggatacataccagtaaggtcttcctaaaggatttttcaaaggtaattataactatacaaaatttttaccttacatgctgactacagactataattcaagtgatgccatttcactgcactgccttgacaaaccttttccatattattgacatttacactattcccaaattatccctagaattagcaatgtcgaaatgagtatagttagttctaagtctttttctagatctgttactttcctaggatggtgtatggtaggtcaaacatgatagtattcatattttttaaggtctcaatatatgctaccaaatttcttccagaaaattaaaaaaattgtttttgtgggtacaaagtaggtgtatatatctttggggcacatgagatattttgatacaagcacacaatgcataataatcacaccagggtaaatggggtatccatcacctcaagcagttatcctttctgttacaatccaattatacttttagttatgtgaaaatgcacaataaattattgttgactatagtcaccctgttgtgctctcaaatactagatcttcttcattctattttttgtacccatcagaaagcttcttaatgtgctttcatcatcctcgttatggatcttccacatccatatccacatttcatatactcttaacaatctgattctttataagactattttatagcctagaagatggcacaaaggtaaaaattttatggttcatttacaataaattattttaaaagaaaaattcttgcctgaccaatatctcgatataataggatttactctacaacaaaggtattgttgctttggctgttataatttgtggtataactacctggtaatctattaaaatgtttctatttgtaaaaatttaaaacagtcctttaactttttataaattattgtgttgtgtggtttccccatcctcccaaaaaaataaacgatgaaagaagaagtaatctcattattatcactttccttgagaactatagggacagctgttacaggatactctgaggtaggttaagaaaaggagagaggaaaaagattaaaatgggatataatctgcatcaggatgaaaaaagagtcagtttcatttgtttaataatatgcaacaaatgccactctaaatgtatgctccatttttggttgttttagaacaagagtttaatattttctatgtatgatatatacaaaaaatcagtttagaactcaacaatatttttaagtgattgttacagagttaaagatgtgtattacatttttttttttttccaaaagagtctatacatccattcgtaatatgcttgttcttaaagctttgacccctgtcttaggtactgatacaaatgccaaagtcaaaggtacccaaaactgtttcctctgaaagggtaagttatatgaattttggtcactttcactccctggacctagactacactaaatatttgaattggctcatttgtcctacaagttggtttacaatcaatttttatcttattggccacttttccttttctttttagaggttttttttaagtggaggataaattattttagatttctccatgatttcagaacatttaccactgtctaataaaattattaaatgactgctgagagtcacactttcactttgttgcccttctgtacaggacgcaattgatgtttttagggcatgggataccttttgactattactctcttcatatgcctaaatagatacatatttttaatttgataaaacctcacaccaaacagttctttaatattatagatgagaatcacttcataaacaaagtcagtgctactcagttaaacaaaattttttaaaaatgtaccaaagatagtttaaaaacagctttacaaattatgcaacaatgtttataatgccgtaaaacaaaattgattatatatataaatgcacagaataagatctgtttactctatttacctcttggtgaaagaatgaaatgtgaaaataattttgtagttttaaaaagcgggtgaacattcatacattattggtaataaaacaaagagcccttttaaaattaaatacttactgtgtaattgaattttgaacactcttctcatttaaggtcattccaggaggtgggtcattttgcaaagccaacagttctttctgtagtcgtttctagaaaagaacatcaataataatttgtcctttttgagactaggtctgggtcacccaggttggagtacagtggtgtgatcacagctcaccacatcctcaaactcctgggctcaaggaatcctcccacctcagcctcccaagtagcttgagactacaggcacacaccacaatgcccagctaattttttttttggtagagatggggttctcactttgttgctcaggctggtagtgaactcctggcctcaagcaattctcccaacctcagcttcccaaagtgctgagattacaagtgtgagctaccacactcagcctgcacttttaaaaaaacaacataacatctttccagttatccttgataatatccttctacaatctgaaatcattaaatttcctccaaatgttcatacctttctctttactagccccttatatattctatatacatattgctcaaaatttgaatagcctgtcctataattcacaatctattgtcaaactatttcaacactagagcttccaggcagctgaatgtatggagtttcctggagggtggcacatctggaacggaacatggaaactccacatcccttccctcatgtacttcttcatctgtatgcattataatattctttcctataaaccagtaaatacatctatggcagtaatagtagttctggcagcagccaccagagcctcaagagcacagccaaatgggtggctttcctggagaatctgctggaagacctagaaggcatgaaaagattaaggaaattttttaaaaagatattcaatgaagaaaatattttgttttggctagcatgtaaagatttctttttttaatgcaagataagcagatgcaagaaaaggcaaaggaggtctacatgacctttctttccagtaaggcctcgccacaagtcaaaaagaatatattttcactcaacaaaagatcttttcactcaacaaaaagatcctggaagaaccacatcctctgatgttccaggaactccaggactggattttcaatctcacgaagtacaacagctacagtagctgcttaaagtttgactaggtttgttgttgtttattttttaagagacagggcctcactctgtcactccagcaggcatgcagtggcacaatcctagctcactgcagcctggaacttctgggctccagccgtccttctgcctgagtctcctgagtagctaggactacaggtgttcaacaccatgcttggctaattaaaaaaaaaaattttttttttgtagagacagggtctcactatgttgcacaggctggtcttaaactcctggcctcaagtgctccttccaccctgctttctcaaaggattacaggtgtgcgccactgtgccagccctgatttgcttttaaaatacaagcaaactgcaaaagaagagaaagttcaacctgatgctcaaactacagctagaaaagcttctagaatttttaacacgagttcccaaagactggcagatttatgaaggaaagaaagtaggctacgtgtggtggctcatgaatacaatctcagcgctttgggagggagagacggggaaaatgcttgagcccagcagtttgagaccagcttgggtaacatagtgagaccctgtctctacaaaaacaaacaaacaaaaaaaataaataaatatatatatatatattagccaggtgtaggggcatgcacctgtactcccaggtacttcagaggataaggtaggaggatcttttgagcccaggaggccaaggctgcagtgaactatagttgtaccactgcactccagcctaagttacagagtgagattctgtctcaaaaataaaacaaaaattagaaaaatcataacaaaaagaagcaaataaactttcagggtttctaattgccttgttatgtacaaaaactgaatgggatatgtgtattctcttcaatgggatacgtgtattttattaactgcttgaccagtaagttttgcataatggctaatcttacattaaaaaaatagctttgaagtttcggttcacaaaacgaatcgatttcttccacactggaaaaaatatttcaacactgatgctgtaaagcagttatgacgaataggcagttacctatacaacatcaagacatcatagctactatattgaggttgtaggtcgagtagccattatctgaactgcttgtgaccagaactgtttcggatttactggttgagcatcccaaatctaaaaagccagaatctgaaatgctccaatgaacattacctttgagtgtcatgttgctacttaaaatgtttcagattttggagcatttcacatttcagattggggatgctcaacctgcgtaaggtcttaacagcttgagttaaaagtgcttaaaagttttagcagtgcttcctttgctgctttctaattataaaacccatagttcggctgggcgttgtggctcacgcctgtaatcccagcactttgggaggccaaggcgggaggatcgcaatgtcaagagttcgagaccagcctggccgatatggtgaaaccctactaaaaatactaaaaaaattagccaggcgtggtggcgcgtgcctgtagtcccagctactcaacaggcagaggcagaagaatcgcttgaacccgggaggcagaggttgcagtgagctgagactgcgccactgcactacagcctgggcgacagagtgagactccacctcaaaaaaaaaaaaaaaaaaaaaaaagccatagttctccataatccttaaagaatgtcatttcacagacaagctttccagagaaactctaaaagtaaccctttatgcaaaaagcctttcaaaaattttatgccttgtgacgagaatgaaataagaaaaaagaaaagaaaatattaataaaattttaaatgattttatatgtataatttttaaaaaattttaaagtaattttaatatataatgatcacctgcacagtttaatatttcaaggttattgttaatgaacatcgtttatagtagaacatcagaatacaacatattatgatctgagatatgttaaggttttcttcctacatattaggtatcctaaaatggctacgtattttgcacgcttatttgtacagcttttattgtacacctcttcccttgttatcatcagtggacatactttttcagtgtacaaccaggcaaaaacaaaacaaaacaaaacaaaacacagtagtccctaatttatgaattttaaaaccaaataactaatgttattaaaattgcatgcaagattataaagggtcttaatatgacttttttttcagagacagggtctcgctatgttgcccaagctggagtacacaggtgcaatcccactactgattggcatgggagttttgacctgctctgtttctgacctggatcgttcacccctcctcctgagacaacctggtggtccctcgctcccgagaggtcaccatattgatgccgaactcaatgtggacacccaatcgacatagtgcatgacagcccagaactcctgccgcagctttccaaatagctgggacaacaggcacctacactacacccagcgtaagtcttttcttaaagtgaagaagacaagtatggatatctgttcatttcttaagagtactctgcttaaaaattggtttctgttttttctggacaatgaaatattactatcagtaagtaatgtttctacgtcttttcaatttatgtcacttaaaataagcttagccatccaacaccactacagatagaaaactgtgttgtgaatcactgtaatggactttaaatttgcttaaataatttgttttgaataaagacaaatttatgcaaatttctgtttgaacaaggttttaattattttctactgatattcacaaatgagggttctgtgatcacgtacatttttttaaaaactgggtcaaacaaagaactggcttcttcaacagaactttccatatactaacttgtacagtcattgtccaaaggcaagatgacataaagaggtttccaaaaatagctgagcacagtgatgcatgcctgtagtcccagctactcagggggctgaggcaggagaattgtttgagtctagaagttggagtccagcctgggcaacacagcaagaacttgtctctaataacattaaacaaggccaggcacagtggctcaagcctgtaattccagcactttgggaggtcaaggagcatgtaatgcctgaggtcaggagttcaagactagcctgggcaacatggcgaaacctcgtctctactacaaatacaaaaattagctaggagtggtggcatgcgcctgtaatcccagctactcgggaggctgaggcacaagaatagcttgaactcgggaggcggaggttgcagtgagcctagatcacgcgaatgcactgcagcctgggctatagagtgagactccatctcaataaaataaaataaacaaaaaactcccaacaacaacaaaaaagaggtttccaaagataatagaaccctttgtagagcgtctcaagccttgtttcaaggaccatattttgggaaacactgctgcagaaatcttccagatcttgagaactttactaagtcaagaaggataatccttcttagtaggagaagcaagaatataaaggagaatcaatctgcataactaccaagcgaaacacaagacaacaaaagcaaactaaactaaaaaagcgctttattggtatatcatccctggtctcctgaacataatggaaaagggttctatagaaaaaaaaaaaaaagtttctccttacccttagacttctttcatctccacaaaggaagggacctatgatagccaactttcaagataattcccaacaaactctaaaggtcctagtattcacacccttgtgtagttccctccctcagagctgatctgtgtgaccaatggaatacagcagaaatggtgtgtcactcccaagattagattattttaaaaactatggtttctgtggccgggtgcgatggctcatgcctgtaatcccagtactttgggaggccgaggtgggtgaatcacctgaggtcaggaattcgggaccagcctgactaatatggtgaaaacctgtctctactaaaaatacaaaaaatcagctgggcgtggtggcatgcgtctgtaatctcggctactcgggaggctgagacaggagaattgcttgtacccgggaggcagaggttgcagtgagtgagatcaagctgctgcactccagcctgggcgagagagcgagactttgcctcaaaaaacaacaaaacaaaacaaaacactatggtttctgtcttggtaattctctctctcaaatcacttgctctggaggaatcaagctatcatgttgagaacagcctaattcagaggccttcatagtgaggaactgaaacctcctaccaataaccatgtgatgatttgtaggcaaatccttcaattcaaatcaagctttcagatgactactatcttagccagtaccttacctgcaaactcaagagggaccctaagccagaatcaaacaactatgcctctgattcctgaccctcggaactgtgaaataacatttgttgttttaaatcgctaagtttaagggtttgttacgcactgatagataatacaggaccactgctccatcctcccctccatcccagaagggactgtcatctacttcctcatcaatatcactaagtcacaatctaagacattcactggaccatgcttttttactgagggggtggaattattacattaaaaaaagacaattcatgccagcccccagccttcttagctactaggcaataaactgccttgcatattcacatcccctgaaatagtgagagagaagggccagcatttggggggttaaatgagtacatactacattcacaaataaaacattttttaaaaagatacaaacagtgaaaggtcaagcaatgtgtagtatctgttctgcagattcacaaaaacagaattcacccttagttgcattcttcccagaacaacagttcattagacagggcaggaaaaatcctgaagtcgtgattctaaaaaactagttctaagtttcccaaatgtagacatggaagagctgaaagaaaatgatttaaagagctgcatgtaaagataaatgaaaattcacattttgtttgtaaatatgaagaactagtatgaccttttagaggtcacacaatccagaaagctataatcacatgaggctgcattcacctataaatgaagacaaagtattaacaaatttgttaagaaacactagtatttaggacagaacacttgctaaaggtatgacaccactggcttataaaaccatcatggccatactggcctgctttcccaagtggtagggaaaatggcagctacagattgagataactacaaaatggaaaataactgcagaatgttaagtactgtaagtaaagcagcagaaacacccagaaaccatgggggaaaagggagaagaggacatgagaaattaggttccagtggttcatagccaaatattacccttgtctgtcccaaaattggtgaggtatgggaaaattaaccacaaatatactactctcctctgaatctaagacacgccatcaattgtaagatgcatcatcattttatgtgtcactaggaaagaaaaactgctgccaattaaacaatgacacaccttcaataacacatatcctgatttgaaagatgttaaaatatggaaaaagtgcatttaaaaaaatgaagtgggtcgggtgcggtggctcatgcctgtaatcccagcactctgggaggccgaggcaggtgcatcacctgaggtcaggagttcgagatcagcctggccaacatagtgaaaccctgtctctactaaaaacataaaaattagccaggcgtggtggtaagtgtctgtaatcccagctactcaggaggctgaggcaggagaaatgtttgaacccagaaggcggaggttccagtgagccaagatcgtgccactgcactcaagcttgggcaacagagtgagactcttgtcttaaaaaaaaaaaaattatgaagtggtattaaagagtttaattttcctaagtctactgaaaaataaaacttcgagtatgtttctgagttaactttttaaaattgatttaaaaatatatactttgtagagacaggttttagctgtgctgcctggcctggtctcaagtgatcctcccaccccagcctcccaaagtgctaggattacaggcgcaagccattgcacccccagccctgagtaaatttaataactgattcttatcttggtatttaacacctaccccaaaacacatgacttcagcaaatctttaaatatgcactttattcccagaatttgcataggagtgcacagacatctatcctccccagggcgaaaaggcctaaagttatttgcaaaagaatctcattccagaagaggctgtttccttttttttattcttccatccaaaaaagccagtcaggtccagaatgtaaatgttttgaagcatctcaaatctggagaaaacctgaaaactctagcccttaccttgtgttggttcaagtctgcaaagcacccaagaatctgagctcttctaagatacccaaggtttacaaattcagtaagaaggattctgatacatctaaataccaataatggtatgtaaatgattacatactttcagaactggctcggcttttcagtgattttatagtccagctagcagccagctccctttctctccttcctcatcataaaaataaatgatatgaaaccacactaatttattcctttttttccccccggtaagaaaaccattgacaaattccataattaactattgtcaatgtattgggacataccacaaaacggaatgccagatctgtatgtcataataccttggttgaaaatctctactctagatcactacaacagcctgcgatatgcgaccctaaacttaagagtgacaccagcccaggcacagtggcttacacctgtaatcccagcactttaggaggccaaggcaggagaattacttaagcccaggaattcgagaccagcctgcacaacaaagtgagaccacgtctctagggaaagaaaaagagatgacacgggttcagttcctaaaacttttttctgcttgaatgcatgtgaaggattattcctgaaatttactctcccctatgactgggagttactacaggggttgaggtgtaaatttaagttaacatcaaaaggatgctcaagagattaatatacccacttctccctattttgcactgtcacctctccaagaatcactgtaaaggttgcttcacatcaaaggtcaatcagatgtttgcacaggactgtaacctttgtaacatcacttcagcctctgattgactgctttctgcaactaatcagactgattgtgggccaccacttcatttacatgaagtgaacaccaagtggccaatgggaaacctctagggggtatttggacccaagaagattctgtatctggggcccttgagcggctgctctggccactccaaccctgtggagtgtactttcattttcaataaagctctgcttttgttgtttcattctttccttgctttgtgcattttgtccaattctttcttcaaaatgccaagaacctggacaccctccaccggtaacaaatgcccatatttacatattagtttaagtttgctatttcagagagctgcgatgataggtacatcagtactgaaaaagcactactacttggttcttcagtagggaacattactgtttagaatgaatactactacatcaaatgaaatgatcctggttattttgaatcatggaagacatttttttaaaatgctcctagttaaaaaaaaaaaaaaaaaaaagtattttggcacattggctcacacctgtaatcccagcactttgagatgccaaggtgggtgaatcatttgaggtcaggagtttgagaccaacctgaccaacatggtgaaaccccatctctactaaacaaaattacaaaaaatcagccgggcatggtggcacatgcctgtaatttctgctactcgggaggctgaggcaggagaatctcttgaacccaggaggcagagtttgcagtgagccgagatcacgccactgcactccagcctgggcgacagcacaagactccatctcaaaaaaaaacacaaaaaacccacaagtattcaaaatagcatcctaaaaagctcattcatttcttttttggttttttttttttttttttttgaaacagaatcttgctctgccacccaggctggatggagtacagtggtgcaatctctgctcactcagcctctacttcccgggctcaagcgattctcatgcctcagcctcccgagtaggtgggactccaggcatgcatcaccacacctggctaaattttgtattttaaacatggtgagatggggtttcaccatgttggccaagctggtctcgaactcctggcctccagtgatccacctgccttggcctcccaaagcactgggattacaggtgttgagccaccgtgcctggccaaaagctcattcatttttcttttcttttttttccccccaagaaggagtcttgctctgtcgcccaggctggagtgcagtggtgcgatctcggctcactgcaaactctgcctccaaggttcacaccattctcctgcctcagcctcctgagtagctgggactacaggtgcctgccactacacctggctaattttttgtatttttagtagagacagggtttcaccatgttagccgggatggtctctatctcctgacctcgtgatccgcctgccttggcctcccaaagggctgggattacaagcatgagacaccacatccagccaaagctcattcatttctaaattagtctggcttctaagctaattcatttctgaaagtattatcccacattaacacattttgaaaattaaagcacaaaaaattcaaatgatactcttgtggttatgaatcaaaactggaagaacagaatatatccttctgagatgctaataatggcaaaatatcaaccaagaaattgataaaattccttactttgtaaaaaacttactttccagtgagggaagagatagtcaataaataaaaacaaagcaagtaagtatccagttgttcttctgtatcctcaggagcttgattccagccctgccccttttgcataccaaaatccacatatcccaggggctgaacccgcatacaggtaagtcaactctccgatactcaggtataaaatgctggcaattggaggaaaaaaatctacatagaaatggacacacagagttcaaactcgtgttgtttcaaggctctactgtactatatgatatattaaaatatgaagaaaaataaagcaaattaaggggatgggggaggtatagaggtctcacattttgtaaagttttatctcaacttgacattttgagaaactatcctaaagggtagaaatcctcattcagggaagttaaaagtacaaacaagagaagaaaaaacattaaaaaatgtgggaatatataatggttgctaatacaactgtatataaaatgaccaagaatgttttctccaatttcatctaacaaccaactaaagatggaaagttaaaaataggagggtatgatggaaaaaacagaaacaccattcacattaatattaatagcactgcactaataagtagatattatttttccctaacaacattaagaaacagaattctaacagtggccacttctcctttcagagggaaatgtgaggcaatgtattaaatttactattttttttttaaaacagaactaaactcaggctgagtaaggaagcattttccctcctactgaattctgatgacatttctaacagttacttattaaaactgttttccctttcaggaaagagaatgcaatgtaggtattcattcttagtttaagctaaactttttaaaattctgacaaatgaaaaagtgtcaagacttaatgatttctgctcttaagagcccacagcccacaaaaggagacaaatgtgccaataatttctccatgctttcagagtacagtagtgtccaaaagaagagtggtaagaggagaaaaaccaggactgtggtatgcacaaagccaaggaagaatatgtttcaaggactaaccagactttcttttccagcacaatggcagagtatataccccggataattacagagaaaacaaagacaaagtgaacgcaggaactctgaaatgtaaggattaggactggattttgccgtggagatttcaaacaaatccaatagcaaaaccaaagtgaagatgctaacagaggagctacctgaaactatgatccctcagtgtaaaggtgaacaagaaaatgggcaaagagacaacaatgaaatttgcctactttaaactgaaaaaaattctcccctgaaatttcataacctcaacccacatggattcatagcctgaattcctgctacctgagaacattaagcaaggatttaataaaaagtagtccaggaagtggtggcctcaaagcaaccagcagaaacgaacacaaatataaatcctggagaaatccaagttctgtcctttgaggcaacaatttcactgctcagaatcgtagaaagatacatataaaatagcttcactgtaaacaaaatctagaaatatatatccatcaataggtaaattatacaaattatagcatagcaaactaagactatgcaaccgttaagaatgacgtggggccgggcacagtggctcacacctgtaattccagcactctgggaggccgaggcgggtggattacgaggtcaggagattgagaccatcctggcttaacatggtgaaaccctgtctcgactaaaaatacaaaaaatgagccgggcgtggtggcgggcgcctgtagtcccagctattcgggaggctgaggcaggagaatggtgtgaacccgggaggtggagcttgcagtgagccgagatggtgccactgcactccagcctgggcgacagagggagactccgtctcaaaaaaaaaaaaaaaaaaaaaaaaaaaaaaatgacgtggacgtgagtactgacaaaaaaaataataaagaactccaaaacctactgaaataaagaaaaagcaagcctcaaaaatacatgtaatttgttaaaataaaagaggtgtaattacacaacatataaatgcacacaaaggaccaaaaacacattcaattattttgtacttggaaatggcagtggagaaagaggacatactgtttgcactacatgcctttatattatttggctgttttacaaaaatgtagaagtgtattttttgtataattaaaaaataactcaatggatgatgaaaacacattcacacaaaaacatatatacaaacattcatagcagcattattcataatgccaaaaaacaacccaaatgcccactaactgaagaatgaacaaaatgtgacaaccatgcaatggaattttatttcgccttcaaaaagaatgaagtactgactcattttacaacacaaatgaaccttgaaaacattatgatgtttttgaatgaagccagtcacaaaagaccacatattgtatgatatcactgatatgaaatgtctataacagtcaaatctgtagagatggaaggtaagctggtgattgccaggggctggggaaaggagaatggagagtgactacttatggacacaaaggttgctttttgggcatgataaagatgttctaaagtcagattaagggtatggttgcacaacagagtaaataaatttaaattatcgagtgtagaaatgggactattttatgacatgtaaattacatctaaataaaaattttttcaccgagcacaatggcttgtgcctgtaatccaaacactttgggaggccaaggcaggaagattacttgcagccaggtgtataataccaacctgggccacacagcgagaccacatctctacaaaaaaataaaaaatttgcccggcatggtggtggtatgcacctgtagtcctagctactccggaaactgagggggaaagatttcttgagcccaggagttcaggttatagtgagttatgatctagccactgcactccagcctgagtgacagagagagaccctgtctctttaaaagaaaaaagaaaacctcaatgagtaaagaaactaaacacaggtgaagaaagaatttctacttaggaagatggcctgaagaaattacccaggatataactcagagaaacagataatgaaaatatgaaaggtagagacaccaaaaaaaaaaaaaaaaaaattagagaacagaaagcaacattttctataaatgtttcttaaataataatgtgtggtggtgcacacctgtggtcccatctactcgagaggctgaggcaaggaaattgcttgaacccgtgagacggaggttgcagtgagtcaagactgcgcaactgcacttcagcctggcaacagagcaagactccatctcaaaaaaaataatagtaacaacaataataatgcctgagaatctcccagaattgttaaagacatcagccttcaggtcaatgaagcccaattaattctaagcagcataaacaagaaatccaaacttaaacatcactgtgaaagcataaaacaccaattaaaaagagctaattcccctccccctccccctctgcacggactccctctgatgccaagccaaggctggactgtactgccgccatctcaactcactgcaacctccctgcctgattctcctgcctcagcctgccagtgcctgggattgcaggcgcgcgccgccacacctgactggttttcgtatcttttggtggagacagggtttcgccgtgttggctgggctggtctccagctcctgaccgtgagtgatctgccagcctcggcctcccgaggtgccgggattgcagacagagtctcactcactcagtgctcaatgttgccctggctggattgcagtggcatgatctcggctcactacaacctctacctcccagccgtctgccttggcctcccaaagtgccgagattgcagcctctgcccggccgccaccccgtctaggaagtgaggagcgtctctgcctggccgcccatcgtctgggatgtgaggagcccctctgcccggccgcccagtctgggaagtcacaagcgcctcttcccggccgtcatctcgtctaggaagtgaggagcgtctctgcccagccgcccatcgtctgggatgtggggagcacctctgccccgccgccccatctgagatgtgaagagagcctctgcctggccgcgaccccgtctgggaactgaggagtgtctctgcaccgccgccaccccgtctgggaggtgcggagcgtctccgacgggccaccccgtctgagaagtgaggagcccctccgcccggcagccgcccggtctgggaagtgaggagcccctccgcctggcagccgccccgtctgggaagcgaggagcgtctccgccctgcagccgccccgtccaggaggtggggggcagcccccgcccggccagccaccccatccgggaggtggccagcccccgcccggccagctgcaccatctgggaggtggggggcagcccccgcctggccgccgccccgtctgggaggtggtgggcgcctctgcccggccgccctgtctgtgaagtgaggagcccctctgcctggccaccaccctgtctgggaggtgtacccaacagctcattgagaacgggccatgatgacgatggcggttttgtcgaacagaaaaggaggaaatgtggagaaaagaaagatcagattgatactgtgtctgtgtagaaagtagtagacataggagactccattttgttccgtactaagagaaattcttctgccttgggatgctgttaatctataaccttacccccaaccccgtgctctctgaaacatgtgctgtgtccactaagggttaaatggattaagggcagtgcaagatgtgctttgttaaacagatgcttgaaggcagcatactcgttaagagtcatcaccactccctaatctcaagtacccagggacacaaacattgcggaaggcggcagggccctctgcctaggaaaaccagagacctttgttcacatgtttatctgctgaccttccctccactattgtcctatgaccctgccaaatccccctctccgagaaacacccaagaatgatcaataaatactaaaaaaatttaaaaaaaaaaagctaattctaatgccatacacaaaagatagattagctacaaagttatagaaattagaaggctaccattttaagaacaatgatgtcagcactagaaatcagtaaaaatatattttatgtaagtaaaaccaccaatttaaactcctataccaagcaaaactaagtttaaaaaaaaatggatgaaataaagatatgtgcagacaaaagttttactaccaacagtaaccaacaaaagattaaaccctgaattccttctggaaaatgatcccaagggacagatctgagatgaaagaatggtgggcagatacttaaagtgtgtacatctaaacaatgaataaaacaatacaggcccacagttccttacgaaacagctcttggatgggcacagtggctcacacctataatcccagcactttgggaggctgaggcgggtagatcacctgaggtcaggagttcgagaccagcaggaccaacatgaccaacatggtgaaacctcacctctactaaaaatacaaaattagccaggtgttgtgactgatgtctgtagtcccagctactcaggaggctgaggcaggagaattgcttgaacctgggaggcagaggtcgcagtgagtcaatattgcaccactgcactccagcctaggcaacaagagcgaaactccatctcaaaaagaaaaagaaaaagaaaaaactctttggggcagatgtttcagacttaaaaattttttagatttaaaaaaattttttataaagcagcacaccaccaaacacattagtaatcagcactaaaatatgtgaatacttaaaatatacaggatttttaggaatactgcaatctaatgccccaaggtcacaggctttgccaccaggaaagtttgtgaccaacttacaaaaaaaatttttggtttttagatcttttttaaattttggatgggataagaatatgagcacaaaatgtctaatttgtaaaataaaacaagacagaacgaaattacaaggcattcaacacataaatttggaagcaggtgatggggagttaaagcattttaaggtcgtagtgtttaagaagagtgcaaacatgcagataaactttagattataataagtatgttaaattagctaccataatggctacaaatcattaacataaaaaactaactgggccaggtgcagtggctcaagcctgtaatcccagaactttgggaggccgaggcgggtggatcacgaagtctcaggagattgagaccataccggctaacaaaaccccatttctactaaaaatacaaaaaattagctgggcgtggtggcacgcacctgtaatcccagctacttgggaggctgaggcaggagaattgctcgaaccagggaagcagaggttgcagtgagccaagattgcgccaccgcattccagcctgggcgacagagtgagactctgtctcaaaaaacaactaaccaaacagaaaaataagcaaaagtctagaattcgtaattcacaaaaacaccataatggctaataaaaacaggaaaagaaacgcaacctcactggttatcagataaatgcaaattaaagccacactacaataagtaatggttaacactcaacaaactggtaagaccagcttggtaggtatgtacgggaactgaagttctcatacatggctggtagaagtataaactggtaaacaattttataaaactacttgcttttttttgtaaacttggatatagaaatatgctctcacccaccaattccattccaaggtatacccagcatatacgttcaacaaaacacaggtacaaggaggatgtttgtagcagcattatatgtgaccaggcccaaacaagaaaaaactcaaatgtccatcatcaacggtaaaacgggtatattgcggccgggtgctgtggctcacacctgtaatcccagcactttgggaggccaaggcaggtggatcacccgaggtcaggagttcaagaccagcctggccaacgtggtgaaatcccatctctactaaaaatacaaaaattagccgggcatggtggcaggcacctgtaatcccagctactcgggaggctgaggcaggagaattgcttgaacccaggaggtagaggttgccatgagccaagattgtgccattgaactccagcctaggcaacaagagtgaaactctgtctcaaaaaaaaaataaaaacagccgggcaccatggctcatgcctgtaatcccagcactttgggaggctgaggcgggtggatcacctgaggtcgggagtttgagaccagcctgaccaatacagagaaaccccatctctactaaaaatacacaattagctgggtgtcgtggcgcatgcctgtaatcccagatactcgggaggctgaggcaagagaatcgcttgaacccgggaggccaaggttgcagtgagccaagatcgtgccattgcgctccagcctgggaaaaactgtgtctcaaaataaataagtaaataaataaataaataaataattggtaaattgtatattcatacatggcaataaaagtgaattacaacacagatcatagatctcacaaattaatgtgagcaaatgaagtcagacagaaaaataaatatacagtataatttcatttatgtaaagctcacaaacaggcaaaagcaatctatagtattagaatcagaatgtaagctgggcatggtggctcatgcctgtaatcccagaactctgggtggctgaggtgggaggatcgctttccaggagtttgaaactagcctgggcaacacagggagaccatgtttctacaaataataaaaaaaattagccaggtatgctggtgtgtgcctgtggtctcaattactcagcagacaggagactaaggtgggaggaacacctgagcctaggaattggaggctgccgtgagccgtgatctcaccactgcacaccaacaggggtgacagagtgagatcctatctcaaaagaaaaacaaaaaagaaatcaggatgtgattacctttaggagagggaggaagtagtgcttaggaacggacataagggaggcttccaaggtggagctaccattttattttttcatgtatggtgattacaaaggtgtattcactttgtgaatatatgaactttacatgtagatttgtgcattttcctgtttgttgtatttcagtaaaaacatgtatcaaactgatctaaaattgactggtgatagttgcataactccacgaatatattaaaagtcattttaaatggatgagtatattatgtgagttggttcacaataaagctgtcaacaaaagcaaaaaaaagtttattaaacaaaaaaagaaaaagcaaatatggaaaatgttaattgttgaatctacacaaaagctacagaggtgttaacactgtttctttctacttttctgcatgcttgagatttttcgtaaaagttttcaataaaaaataacagtaaaataagtgcaaaaaaacagctacagtaacatctaaaaaatattgtaggccaggagcggtggctcactcatgtaatcccagcactgtgggaggccaacgcaggtggatcacctgaggtcaggagttcaagaccagcctggccaacgttgtaaaaccccgtctctactaaaaatacaaaaatcagctgggcatggtggcgggtgcctgtaatcccagctactttggaggctgagacaggataatagcttgaacagcggaggtggagattgtagtgagccaagatcgcgccactgcactccagcctgggcaacaagagtgaaactccatctcaaaaaaaaaaaaaaaaaaaaaaaaaaaaattgtgtgtaacttccaaactagtagaggtatgaaaaatagaataagaaaactgaaaaagaactcaatccaaaataaggaaagacacagacataggaagaaaagacaaatgaaaagtacttaaaaggaaagaaataaatcctattatattactcattaaaaatttgactaacttctttagtaaacagtaaagaatattagattggttaaaaagtatagttatttgagtttttttaaaagatattactaaaatgttaagagtacagaatggttcagagtcaaaggatagaaaaaagatactaggataagttttaagaaacaaagctggcattgctatgttaatatcaagtgaaacaaatgttaaggccaaaaataataaaagatagaataactatataatgatatagtcaccatgagcataaaacctgtatacacttagtaacaacctcaaaatagataagcaaaggacaatctacaagtctatcttcatagaagattttagtaacacctctcaaagtaatgaacagctcaagcagaccaaaaagcaaacaaaaggataaccgaattgagaaagtcaaaagttaagaatagacatttaatagaagagccacaaatgccccaaaacacatacaattatactcaattattcttattagctaaggaaatataatagaaccataaggagtatctttcaccaaaataagtccagtgttggggagaatgtggtatacctggaactcatgtactatcagtaagagcataaactgatgtaatcactttggaacaggatggcattatctagtaaaacggaacagacatgccataacctagcacttgcatttgtaggtcaataccctaagagaaaaccatgaaaatgtgttacaacatttaaaccagcactgttcataacatgttaggagtaaaactgatcaaatgtgatagtttataccatgaaataccacttacttagctttaaaaatatactgctacaaagatggattaatcttgaaatgataaaagtcagaaagaattactaacagtatgagtccatttacctaaagtttaaaaacaaacaaaatatattgtttaaagtaaatataaggaaaaataaaggattacaaacataaaatccaagacagcaatttactgtgggaaggaaatagtgaggtacaatcagcaggacattaaaaaaaaaaaaaaaaaaaaaaaaacaggacacagaaggggcttcaaaggtaatggcaacttttattccttaagcaatgtgaatattttataaatattctttaaaatattcacctatgatttctatttttatatttttatttaactttttttgagacagggtctcactctgttgcccaggctggagtacagtggcgcaatctcggcttaatgcaacctctgcttcctgggctcaggtaatcttcccacctcagcctcccaagtagctggaaacacaggcatgcaccaccacaccctgctaatttttgtagagataggattgcgccatgttgcccaggctggtcttgaactcctgggctcaagtgatccttccacctcagcctcccaaagtgctgaaattttaggtgtaagacaccatgcccagcgtcacctatgatttttaaattcttctgtatgcatgtttcattatctttttttttttttgacactcttaaatttgattgtgaagggaaagaaagcaacagggtggtagcagaactgaggcagaggcaggtgtttgttaggagaaacttctgcatatgtaaatattgaagagacgggtaaaggctagagaaaggtggtgataaatgaaattgtaaaatatctgagaaagaagagatcagctagatgcggagtacagaattagagactttacaagggattgtgttttcaatgggtgttactactctacacaggaaaaaatatacatttttaaaaattaaaatcaccccttaatctcaccatgcagtgatctccttgggacagtgatttttctttccatgaatctgtattttctaatatttggcaataaacatatgtaaagtatttttaaataaaaatatgatcatgctgacaacaatgtggcatatgtactggagaagttaagactgaaggcaggaaagacaggctgaaaactactagaaaaaaattacatttgagacattactaatgaacaactggaggaatcaaaggacttacttaggatgcagaatgaactagatttggtgacaagtggatgtgcaaagtgagaaagagaagaaatgaggctgaccccagagtattagtctggatcaatgacaggaagaagctaggcatggtggcttcttggcctataatcccaagtacttgagaggctgaggcaggagttcaagacaagtctgggcaacacagtaagacccagtctctcttttttttttttttaaaaaaaaaaaaaaaggaaagagaaggtggaggaagggaagacaaaaatgaagggggaaggaaaaaggagggatggggagaaagaagaaaggagagggaggggagaggaaagaggagcaatacagatagctggtctgtttatgaagggttggaggcaactgagattaagattagttttggacctgaccagttcaagttccctgtgaacattgagattgacagaacaaaacaacggaaccagccagaaatgaacaatgactattccctttaaatagagctgccctctttagggtgggtatgctgtctaccatgaatccaatgtatgtacatgtaccttaaacctgcttggctccaagaggcaaagagtttactaccctagaatcaaattttaatttctcaagctagttcagaagttatctgtctagtattcaggaaatgaacactccaaatgaaatatttgttttctgaaaaccttgactcagaatgaaataaaatacagttctgtatctttctctcattgatccctgcatttcatgccatagatgaaaagcagtaattagcactaagcctgacagagttaatgtttcatttaagccaaccatttttattttactttggaagaataaattttttttcttgtaaaaatacaattcaaatttttttaccttccaggtttcagcaggcttagctaccttcaaagattctgatatatataaattaagagttacataaatgtcataaagcatgtggtgaaaaatctacagccagggtctagcacaaagtattagatacgctgaataaaatgactgataacgccaccttcaaaaggtgggaagtttgacttgaccaacaaattgaactacaaatctcacgaaagaactatgtaaactatgtattagtatactagggtatgtcatgtcatgtatttcttcaaaatgtaagcaaaatgcaaactttaagactgtaagttaggtgctgtaagggatattctatggtctgaacatttatgtccctccaaaattcatatgctgaaatctaattcccaaagtattggaattaagaggtggagcctttgcgaggtaactagatcataagggtggaaaactggtgaatgggattagtgcctataagaaggcagagagctaatttgccttgctgccatgtgaagatacagtcagaaggtgccattctggactactgaatctgctggcaccctggatcttggacttcccagcctccagaactgtaaggattaaatttctgttgtttataattactcagtctaaggtactgaggtatagcagcctgaaaagaaagataaaatagttggttagatggattatttatttggcaaagtcttagttgcccaggatggaatacagtggtacaatcatagctccctgcaatgctcccgcctcagcctcccgagcaactgggctacaggtgcgtgccaccatgcccagctagtttattttttatagagacagggtcttgctatattgcccaggtttggaatttaactcctggccttaagcgatcctcctgcctcagcctcaaaatgcactgggattagagatgtgaaccattgcgcctgacccagcaaaatatatttaattggaaactcaatctctgatttgtaggagtgtataatacatgcaactttggataagtaacaatgtgtaccttagtatcttcataattaaatacctcagattgttattgaaagaacacaatgagatgggctggcagatacaactattttcaagcttaaagttccaaataaacatattaaagtagtattaatattcacagatgacaataaggaaaaaaataaaatgggaaataaaaagaaaagatgatcctaaaacagtttaccctaaccaactttcttgtaaagtaaataaagccagcatggtgggtcatgcctgtaatcccagcattttgggaggccaaggtgagaagatcgcttgagtctaggagttcaaggccatccagggcaacatagtaagacccccatctttacaaaaaataaaaaattagctgggcgtggtggtgcacgcttgtagtcccagctactcaggaggctgaggagggaggatcacttgagcctgagaggtcaaagctgtagtgaaccctgattgtgccactgcactccagcatgggtgacagcatgaaactccgtctcaaaaaagaaagaaagaaagaaagaaaaatattgattctatgacttagtaacaccattcttaaaaatttatactaaagaataccataaaattaggggaggcaatacaaatgcctaggagtaaaaaataaataaataaataaataaagtggaaacaacagtagatcatggcatattgttagaataaatattgatgctcaactctttaccaatcaaaaggcagcttccagagcttttaagttctatgacttaaaaagaaatctaggttagatctttccttctagtagatttagtctcaaaggaataaacatctggtgatttgtattataatgagcattactgttagaacattcttctaataaatctattttttagaaaagatgtactgcattgtcattgccatttttattgctgaggtcaatattttccagtgaacataaaatctagttttctaataaactcatctcagatggataaaattggtaccatagattctctgagaacatttttcttctgtcaagtaagtagtgttctctgaaaagtatgaattacaaatacagttaacccttgaataatttgagagttggggaaccaagccccaagcagtcgaaaacccacatgtaacttccgactcccccaaaacttagctactaataaacctgttgaccagaagccttctgttatttgtcagttacataaagtcaattaacatgttttgtatattatatactgcattcttacaataaagtgagctagagaaaataaaatgttaagaaaatcgtaaggaagagaaaatacatttacagcactgtgctgtatttatcaatacggtaaatttatgtcatctgtttataagatggaatcatctatctgaaatggtgggcaaccacaactgtaaatctacagtatgtatgaagcagttcaactttttctggcaatgtcatgactttcctctgcttctttggagtacttccagcatcactggtggcattttgtatggattccatagtgtttgattcaaagtttgcagtattgcactaaaacacaatgaaaaatacaccagaatagtgagagagcactttttactgtgatatgcaatttaaatgcgagacaaactgctcatgcagagggtcatacagcatgttaagtggatattcccaacacttgagctcacagcaatagcaacagaaggtgattatgaaatttgatgcagttatgatttgatacttcatctttatattctactttctttttttttttttttttttttttttgagacaaggtctcactctgtcacccatgctggagtgcagtggtgctatcttggctcactgcaacctccgcctcacgggttcaagcaattgtcctgcctcagcctcccaagtagctgggcttacagatgcacgccaccacacccagctaattttttttgtattttttggtagacatggagtttcaccatgttgaccaggctggtctcaaactcctgacctcaagtaatctgcccacctcggcctcccaaagtgctaggattacaggcgtgagccacagcacccagccctgtttacatttcttgactgtgaacagtgctgtatatggtctgtaagtgtgtaggtatgaaagttttgttaccttctggacccaattttttgttaataaaaaaatcatttaattattaattaaatcattacttattaaatgattcttaaagttccttttagtttaaaaatcccagaacctaggttattctactcattttcacaagttaaagctttattgagagtctttttacatattgttcagcctaattcaatcatgtatctgtaattacttttctatagttttatacatagtttatattctcattatgttttagtacttttctatattaccttcgtctaatgctattgttatttccatatatccatatccttaaacaactataatggtttaaaatgttccaaaaaaactaagtaataaatttggttttagtacaaactgtttcagtcaaccaaataaacaaattaccattttgataacaaatagattaaaactcatgtcatcattaccttgtatcttgtcctaagtaaatagattaccattttcaatttaacattgtaggaaacgctactcagtgtaaacaactcccccctccccactttctacctttaaacacccacttaaacatagacaaattatatacacttatgaattttttttttttttttttttttttgagatgggagccttgctctgtcacccaggctggagtgcagtagcacgatcttggctcactgcaacctccacctctcaggttcaagcaattctcctgcctcagcctccccagtagctgggattacaggcatgagccaccaggcctgactaatttttgtattttttgtagagacagggtctcgctggtctggctcgaactcctgacctcaagtgatctgcccgccctggcctcccaaaatgctgagattacaggcatgagccactgtgtctggccacacttatgcatttctaagcactctttacacagaagatttccatcagcaggaataaattttttttttttgagacagggtgttgctctattgtccagactggagtgcagtggtgtgatctcggctcactgcagcctccgcctcctgggttcaagccattcttgtgcctcagcctcccaagtagctgggactattggcatgtgccaccacacctggctaattttttgtatttttagtagaaagggggttttgctatgttggccagactggtctcaaactcctggtctcaagtgatccgcccaccttggcctcccaaagtgctgagattatagacgtgagccaccatgcccagcctaaaatcttaaaatgaaccgctaactttatggttccagggtagttactttgtcaagcccaaatacacacataataacaagacagtttgggaaactttttaattcaaggaagaaagtgatttgttttcttctttatcatgctcaggtatactatactgtgattttagggattttaccaatactttctcctgacatactaggtggaaacttgtatatgctggtcagagtcatcaacaagtaggaaaaaaaaaatcacatttaattcttacaggaagattttctaagctgaaaaatacagcaaaaatgtttaaaccctggcacttaaggtagatagcaaactaaagtatctcatacatagagaactgaccaaaataaaaataccaacttttttcactacaatagtttcaatgtatgtgttctaaaatataataatgtattataaaagattgcaagtatgtaagagtatgtaagatcagtattttgataaagagcaagttcaatcttctaagccttcttaaaaacaacttttgggccaggcgcagtggctcacacctgtaatcccagcactttgtgaggccgagatgggcagatcacaaggtcaggagttcgagaccagcctggccaatatagtgaaatcctgtcgctactaaaaatacaaaaattagccaggtatggtggcagacgcctgtagtcccagctactcaggaagctgaggcaggaaaactgcttgaacccgggaggtggaggttgcagtgagccgaaatcgcgccactgcactccagcctgggtgacagagtgagactccccgtcttaaaaaataatgataaataaaaataaaaataaaaaaaccttttgcttcaaagtttacataaacttgggcctcagttgccaaaagtagccatagaatgattctgagattttcagaatacctttaagcggctgggcatggtggctcacgtctgtaatctcaccactttggaaggctaaggcaggcggatcacctgaggtcaggtgattgagactagcatggccaacatagtgaaaccccatctctactaaaaatccaaaagttaggcaaggcatggtggctcacgcctgtaatcccagcactttgggaggccgaggtgggtggatcacctgaggtcaggggttcaagaccagcctggccaacatggtgaaacccagtctccaataaaaatacaaaaattagtcgggtgtggtggtgcacacctacagttccagctacttaggaggctgaggcaggagaactgcttgaacctgggaggcggaggctgcagtgagccgagattatgtcattgcactccagcctgggtgacagagcaagacttcatctcaaaaaaaaaaaaaaaaaaagaacataaaatatatttatgacaagtttcattctaagaaggaattaagaaatatgaaaagtacaaatactgacttataaaatcagttttgacatcctacgttgccaattcaagaaattatcagtttaactttcaatcattttcaattattaaaactacagcagctgaatttttaaaaattcagtatattaactgttgccagttcatgaagatttaaaataatttaaaaatatatttttaaaagaaaagtctgacttcagtcataagcagacaccaaaaaaaaagtcaatgttagaaaaagtgctaaaaaaaaaaaaaaaaaagcagcagctagtaccttttaacactatttttactatttaggatcatgggtagtcctttccaagccatcaccattaactgtcttaactttctgttacttgtacttattttcatcacgaacttgcaaggcttgcaaggactgaaccaaccttctctatcattaggggggtttttgcgtgcgtgtgtgtgtgtgtgtgtgtgtgtgtgtgttggtttttttgctttctttttggtgagtcttctaaactgagcaatttcttcaagcacagggggtttttgcgtgtgtgtgtgtgtgtgtgtgtgtgtgtgtgtgtgtgtggtggtttttttgctttctttttggtgagagtcttctaaactgagcaatttcttcaagcacagctgaccctcaacaacacaggtttgaactgcacaggtccacttatacatggattttcttctgcctttgtcactcctgagacagcaagaccaaaccctcctcttcctcttctcagtctataacaaggataaagatttttgtgactagctgggaatggtggctcacgcctgtaatcccagcactttgggaggctgaggcagggggaccacttgaagcccggagtttgagaccaccctggccaacatggtgaaacctcatctctactaaaaatacaaaaattagctgggcatggtggcgcgagcctgtaatcccagctactggggaggctgaagcaggagaatcacttgaacccaggaggtggaggctgcagtgagctgagattgcgccactgcactccagcctgggtgacagagtacttaatgaatagtaaatatattttcgctcatgattttcttaataacattttttctctatcttactttattgtaagaatagagtatataatacatatatcacacaaaatatgtgttaatcaactgtttatcttataggttaggtttccagttaacagtaagctattagtacttaagtttttgggaagtaaagttatatacggatttttgactgcacaggtggttggcttcctgttgttcaagggttaactgtaaattagaagaatctgaagtaaagctctgtcatcatgcaaaagctgtaactatgtttcagaaacgcaatctgtatttcatagacattaacagatgttctgtcctctgcaacatctaaaagaaccaaacacaaactccctataccaaaatactcccatctcccctaagcacacacagttctactctcagacacaccttaaaaataaaacatttggaaaaggaataccatttcagaaatgaggaaaagtatacaaagacacaacacatttgagtttggaaagaaagcagtcacataatcttaccatcaatgaagcaagacctaaaattacttgctaaattacttgctgtcagtaagggttacatacaggaagcttaagaaaaaatctactatggggggcagggggcgggggaagaaaagatactctcattgaagcattatctgcaaagtgaaagaattaccaaccaaatattaactgggctgaaagatgtgtatcattaacaggaagcttaccctgatttttaaatgctgtataaattttccttttcaacccaattctttactttctctaactgggacaaggcagaagcaaaagatagacagcaatggaatcagagataaggcaagaaggcaatatactcaactgtgttttcctatcacttctggcctattttgaaaacagtactatttatctttgttctatttattaacccagaaaacatctgagtgatgatgccagtaagcactgccctcattgagttaaaaatctaataaagacaaagtgtctttataatagctacaaggcagaagtgaaaaaccctacgaaagaggtaaaacatgatacggaggcacacaaggtactaaaaagtatgtacagctgtgaggatgaggctaaggttggtggatttatgatgtcaaagtattgagttacaaagaactaaagtggattttgagtaaaatttgaattcaggaagaaagttcaaagagtggaggggctaactaaatgatctgctaggtaagttttaaaaacaaacaaacaaaaaacctaggaacaacaaaaaaacaagacagggagctatcaaaacagcccaaaattcaaaatgaaagttcaggctagacatggtggctcatgcctgtaaccccagcacctcaggaggccaagggaggaggatcgcttgaggcagagtttgagaccaacctgggcaacattacaaaaaattttagaaattagctgagcatggtggcatgtacctgtagtcctagctacttggaagactgaggcagaaggatcctttgatcctagaagttcaaggttacagttaaggtacagttgtatcactgcattccatcctgggcaacagagtgaggtcctacttctaaaaaaataataaaaataaaatggaaattcaacataaaaagtcactaataatagttgctaaatactcctagcaagtaaaggatactgacagaatctccacatatgcagtaatatccataaggacaagagagatataagcccaggggccagcgtcaaacaacttgattctcaagaattttagtgaactgataagttcagcataggttgtagaatgagagatacaaggactagcaataataatgaccccaatgaagggcaaaaagacttaaaaacaagaatatcattccaagtacctagaaaggactattcttggtacggggccctgatatggtttgatacaggcccctaagattacttctgttgttattttttgtagagatggagtcctgccattgctcaggatggtctcaactcctggctccaagcaatcctcccaccttggcctcccaaagtgctgagatcccaggcatgagccatcgtgaccaacccagattacgttttaaatgagatttttatgcatattcaactccaacgattcatgatataataaaatatttttaaattttgtttaggtggactctaccagcattaaagaagaatcactgagctcataactgagcctatggaaccgccccatagccacatcttaatgtactcagttcactaaaactgctccacaaaaagctctcatgacagctattttgtttgttgtataaaatggccatcaaacaaaacattttactaaagctgataggacagtcaataagtgctcagatatgtacaggaaatgggtggtctttgacagaactataattatgtaggaacaaaacaaatatagatctttccaatctcgaatttgattcttaaatctttcaagaggattaaactttgaaatgtctcctgaactctaaaacaggtacaaggagatgtattacaacttacccaatttacataattggcacacctaaattcctgcattgtagtgaagacgagtctacaactttggctgcacattaaaattacctgaaggccaggtgcagtggctcatgcctgtaatcctagcactttgggaggccaagacgggcagatcatgtgaggtcaggatttgagaccagcctggccaacatggtgaaaccctgtctctattaaaaatacaaaaaatagttttaggtctaacgtttaaatctttaatccatcttgaattgatttttgtataaggtgtaaggaagggatccagtttcagctttctacatatggctagccagttttcccagcaccatttattaaatagggaatcctttccccatttcttgtttttctcaggttaaacgttagacctaaaaccataaaaaccctggaagaaaacctaggcattaccattcaggacataggcatgggcaaggacttcatgtccaaaacaccaaaagcaatggcaacaaaagacaaaattgacaaatgggatctaattaaactaaagagcttctgcacagcaaaagaaactaccatcagagtgaacaggcaacctacaaaatgggagaaaattttcgcaacctactcatctgacaaagggctaatatccagaatctacaatgaactcaaccaaatttacaagaaaaaaacaaacaaccccatcaaaaagtgggcgaaggacatgaacagacacttctcaaaagaagacatttatgcagccaaaaaacacatgaaaaaatgctcatcatcactggccatcagagaaatgcaaagcaaaaccacaatgagataccatctcacaccagttagaatggcaatcattaaaaagtcaggaaacaacaggtgctggagaggatgtggagaaataggaacacttttacattgttggtgggactgtaaactagttcaaccattgtggaagtcagtgtggcgattcctcagggatctagaactagaaataccatttgacccagccatcccattactgggtatatacccaaatgactataaatcatgctgctataaagacacatgcacacgtatgtttattgcggcattattcacaatagcaaagacgtggaaccaacccaaatgtccaacaatgatagactggattaagaaaacgtggcacatatacaccatggaatactatgcagccataaaaaatgatgagttcatgtcctttgtagggacatggatgaaattggaaatcatcattctcagtaaactatcgcaagaacaaaaaaccaaacaccgcatattctcactcataggtgggaattgaacaatgagatcacatggacacaggaaggggagtatcacactctggggactgtggtggggtggggggaggagggagggatagcattgggagatatacctaatgctagatgacgagttagtgggtgcagcgcaccagcatggcacatgtatacatatgtaactaacctgcacaatgtgcacatgtaccctaaaacttaaagtataataaaaaaaaaaaagaaaaaaaaatacaaaaaatagccaggcattgtggtgagtgcctgtaatcccagctacttgggaggctgaggcaaaagactcacttgaacctgagaggtggagggtgcagtgagccgagatcatgccagggcactccagcctgggtgacagagacatcatctcaaaaaaagaattagctgaagagctaagaaaaatgacaatacccaggatgcattccagagcaattaaatcataacgtggggatggtattttttttaaagtttcccaggtgatttcgatgtgatatcaaagttggaaaccactggtttgaactgcatggttaactcaaaaacaacaacaacaaaaaacaaaaaacaaaccaaaaaaaaaaaaggaggaaagtatgatctacagtagaaaatgagaaaatgaaagcagaatcaaacaagaaacctggatgtagcaacattaccttttactagttttaacaggacttcaatacttccaaatcaaaagtatactgaaacttaaatcaaaatacagctgggcagagtggctcacgcctgtaatcccagcactttgggaggctgagacaggcagattgcttgaggtcaggagttcaagaccagcgtggccaacatggcgaaacctcgtctctactaaaaatacaaaaattagccaggcatggtggcacatgactgtaatcccaactatttggaaggctaaggcacgagaatcacttgaacctgggaggttgcagaaagacaagatcatgccactgcaccgggtgacagagtgagactgtctctaaaaaaattttttttaattaaaatacagtcatttctcattattcacagtagttaagctctctacaaagttgtggcaaacactaaataagtaaatatggaatccatggttagaggaaatacagggttagattcctgccagcctctggtcacattattttcttcaaccaatcaaaagtaacttgtttgcatttgtctaaagactttctttttgagacagagtctcgctctatggcccaggatggagtgcaatggcatgatcttggctcactgcaacccaacctccacctcctgggttcaaacaattctcctgcctcagcctcccgagtagctgggattacaggtgcatgccaccatgtccagcaaatttttttggggggggggggcggggggggctgaggggatatttttagcagagatgaggtttcgtcatgttgaagctggtctcaaactcctgacaagtgatccacccaactcagcctcccaaagtgctgggattacacgaatgagccaccatgcctggcctcttatttactatatattgttgattaatatcaaactcacagccaaaagcactataacacatgcctgaacaaattttctccaaaaggcacagcacagccttcacgtatacaaaggaacactagacagcacataagttaaacagtgaaattaccaacaaaaagcacaaaaaagcgaaataatgtggcacaaaatagacctcaaaaagtcttgtttgacctcagctgggagtgtgtgcatagaatgacaaattcttcactgctctttaagtgtgcaaacgtcaaaaaaaaaaaaaaaaaaaaaaaaaaagcactgcgagtatcaattttagggttacaaacaaatgttacgaagacgtgaattcacaaatatggaactcatgaataatgaagccggaccatagaaacaatcaaggtaacctaaactaattgttataaagaaatgaattctatgtctgtaaccccagcactttgggaggctgaggcaggaggactgcttgagcccaagagttcaagaccagcctaggcaacatggcaaaactcatctctaccaaaaatacaaaaattagccaggtgtagtggtgtgcacctgtagtctcagttactcagcaggctgaggtgggagaatcgcttgggtccaggaggccaaggctgcagtgagccgtgacggcactactgcataccctagcctgggtgagagtgaaaccttgtctcaaaacgaacaaaaaatatgcccaacaaggtaattttctctactagaatccttaaattggttttcctaagaatgtaacaagttttcttttatcagatctctctatatatttttaaaacctattactcgatttccttaatatatatatgttcctttcatgtagtacaaaagactattctaattttaaaattttttaaattttatcttatggactatctctaatcataaaatgcagcaatatttaaagaaaaggcaaggtggttatactagacaacacctgagatgccctctggctcaaaggttttgtaagtctaaagactgaagttgataacgcctcttttaattacaataaaggcttataggtgaacacaaacatattctcagcagaccaggagcagtggctcatgcctgtaatcccaccactttggaaggccaaggcaggtggatcatgaggtcaagagatcaagaccatcctggccaacatggtgaaaccccgtctaaaaatacaaaaattagccgggtgtggcagcgcgtgcctgtaatcccagctattcgggaggctgaagcaggagaattgcttgaacccggggggtggaggttgcagtgacccaagattgtgccactgcactccagcctggtgacaaagcaagacttggtctaaaaaaaaaaaaaaaaaaaaaaatatatatatatatatatatatatatatactcagcaatattttatactacaatcacattttttagtagtaggactgcaatataaattcttatctgaggaacagctctccactcacccagagaagtaacctgaatccaacttgatactatcaaacctgatggactctcagcttggtcctatacaacttcaaatggaaaacaagctgccatattaatactatgaaactaaataatccctacattatatgcaaaaatgaattcaaaatgaatcaaagacccaaatgtaaaagccagaattattatatttttggaaaaaaacttagatgcaaatctccatcaccccctggattaggcaatgatttcttagatatgacaccaaataaacaaagaaaaaaacataaattttgccaaaattaatttttgtgcttcaaatgacactatcggaaaatgaaaacagcccacagaaaaaaagtaaattggctgggcgcggtggctcatgcctgtaatcccagcactttgggaggcagaggtgggcagatcacaaggtcaggaaatcgagaccaaaatcagctaggtgtggtggcaggcacctgtagtcccagctactcaagaggctgaggcaggagaatcgcttgaacccatgaggcagaggttgcagtgagccgagatcacgccaccgcactccagcctggcgacagagcgaggctccgtcccaaaaaaaaaaaaaagaggaaatttttgtgaatgtaataaataatgtctaataaaggacatgtagtctaaatatataaagaattcttataattcaacgaaatgacaaattgtttaggaccaggtgtggtggctcacgcctgtgatctcagcatgttgggaggctgcagtgggtggatcacttaaggccaggagttcgagaccagcctggccaatatggcaaaaccccatctctactaaaatataaaaactagggctgggtgcagtggctcacgcctgtaatcccagcactttgggagactgaggcggacggatcacaagctcaagagatagagactatcctggccaacacggtgaaaccccatctctactaaaaatacaaaaattagctgggcatggtggcacacgcctgtagtcccagctactcgggaggctgaagcaggagaatcgcttgaacctgggaggcagaagttgcagtgagccgagatcacgccactgcactccagtctggcaacagggcgagactctgtctcaaaaaaacaaaaaacaaaaaacaaaaaattagccaggcgtggtagcacgtgcctgtattcccagctactcaggaggctgaggcaggagaatcgcttgaacctgggaggtgaaggtttcagtgagccaagatcatgccacagccactccagcgtgagtgacggagtgaggctctgtctcagaaaaaaaaaaaaaaaaaattattgggcaaaaaatttgcatagatatttctccaccgaaataccaatatgcacaagaaaagacacttaatacatcattagccattagtgaaatgcaaaccaaaaccacaatgagatgccacttcacactaggatgctatcatcaaaaaaccaccataataaacactggccaaacatagaaactggagttcttgcacagtgctcacaggaatgcataatgctgcagttgctgtggaaaagtttggcaattccttagtgtggtattgcgatttacaacaagaaatatatatcttcatccagctcctaaaacccttggaatcttggaagttataaatatccttttatatgttaataccatgactggtggctgggggctcctggagagcctcagaagggagactggcagccaaaggaaccaaccatgtgattagagggtggaaacattcagccccaccccatcaatctttggggaagaagggggggctcagggttgaatggaacaccaatagccaatgatttaatcaatcatgcctaagtaatgaagccttgtaaaaacccgaaaggagagtttggagagcttttgaattggtgaataagaacatagccacataccccacggggccaaaggctcctgggttcatgacccttacaaacctcacatatgcatagcttcatctgtctgttcaattgtatcctttaaaatatcctttataatacattagcaattgtgagtatactgtcttccccggtttctgtgagctgatctagcaaattaatgaacccaagaagggggttgtgggaacctccaatttgtagccaagtcggacacaagtcgtgggtaacctgggaacctacaacttgtgactggtgtctaaagtgggggccagtcctgtgagactgagcccttaactctggttagtgccagaaatgaactgcagaacacccagctggtgttgaaaaattgcttggtgtgaaaaaaaaaaaaaaacccacatatctggtgtcagaaaaggagaatcaagtgttgtgggcgagtacataagaaaaatcattgttttttctctatagacttagaaagttaaaacacagagttactgtatgacccatttgttcaacatttactgaggtcctcctacatgcaaggtatattaacaaaaacaaattaaaacacaagcctacataaaaacttgtacatacatgttcacagcattattcatactaaaaaggggaaacaatccaaactgtcaattaatccattgatgaatgaaaacaggaaacacaaatatctgatatttaaataactggtgaatggataaactgcagtacaaccaaaaaatgggccattacttggctacgaaaaggaataagtattcatacaagctacaacatggatgaacctcagaaacattatgaactgggcatggtggctcaggccagtcatcgcaacactttgggaagcctaggcaggaggggtgctgagactgggagtttcaagatcagcctcggcaacacagtgaatctgtctatataaaagctttttttaaggccgggcacagtggctcatgcctgtaatcccagcactttgtgaggccgaggcgggcggatcacaaggtctaggagttcaagaccagcctggccaacatggttaaaccccgtctctacaaaaatacaaaaattagctgggcacagtggctcacacctgtaatcccagcactttaagaggccaagacaggtggatctcttgaggtcagaagtaagagaccagattggccaacatggtgaaaccccgtctctactaaaaatacaaaaattagctgggtgtggtggcgcacgcctgcagtcccagctactcgggaggctgaagcagaagaattgcttgaacctgggagacggaggttgcaatgagccgagatggtgccactgcactccagtctgggagactgagcaagactcttgtctcagggaaaaaaaaaactacaaaaattagctgggtatggtggtgcatgcctgtagtaccagctattacggaggctgaggcaggaggatcacttgaacccaggaggcagaggttgcagtgagcctattgtgccactgcactccagcctgggtgacaaaatgagaccctgtctcacctgtctcaaacaaacagctaagtgaaagaagccaggcacaaaaggtcatatataatataattccactctcacaaaatacccagaatagaccaatccagagacaaaaaatagatgagtggtttccagacactggggaaagggggaaatagggagtgactgctaatggataaggagtttctttctggggtgatgaaaatgttctgcaaacagcagtgatggttctgaacagattaaaaaccactgaactgtatactttaaaagggtaagttttatatgtggattatatttcaattagaagaaaaaattgtgcattaaaaggatgtcaaaatggactttaatagctcacaattttatttgactaattctcaagttttgaagaggattggcaaaaaaacacacacttactggaaaccatacttccaccctccttcctgtggtctgaaaatacaaagaaagacctcatgtaacacatggtcataaaggaaatctattttttccattgatagctagtgcagggactagaaatcagaaaaaaaaaaaagacaaaagcatctagtagagctagcttaaaatgggaaacatagcattaaaagataattcaccaattccaaagatccaggaaatgaaataacctgtttttatcatccctattttatatttggaggtgggaggttacacagctattaaacaacaacactagaattcaaacccaaggttatctgattccaaaagctgtgctcacttattcatttattcgacatttactgaactctcctacatgtcaggcactaggttacatccaagaaaatagaaaataagctaattaatacatagccaaaggtatgaagaatttatcaaggtaaaggaaattattagcgctgggatgggagagctattttatattgggtagtcaggaagggctctcttaaaaaaaaaatatttgaacaaagctatgagtgaaaagaaaaaaaaaaaaaaaaaaaggaagccatccagatcatccagatgtgtgagaagagcattccaaatagagaaaacaacaagcaggagtagcaaggaggacaataaggctacagagacatgagtacctgggagaggttaagacctcctaggctataacatggattttggattatattctgaggaagagagggaagtcatagtaggattatgaatgaaatgacatgacttttgtttagaaagaatctattgggaatctaaagagataagtaaacggatgagggcagaagtaggaaaaccagtatgacactgctaatataatccaggcaagaaatgaggatgtcatctgtatttacatcaggaattcagaaaatcagttgaattctggatatattttgaaagcagagcagatagaaatttgctaatggtttgactgtagggtggaatgaacccaaggtttctggctgagcaaatggaatgaagttgcctatataccaacatggggagtactacagaaaacaagtttgggtaagataaatacaaaatgcagttttatatgtttatctatctgctaatctgtttttgtctacccactacactccataatgatttctgtgcaatatagctttttaaaaagtagtgaaacaggacctgaatttgggtcttttcattacagagcctgtgttctttatctctaatgaagttttacaaaagcagctaaatgaaagtagagtattttcttagaataaaacaactcaaaagcatgcgctgttttttggtgatccaagaactacattcacaaataaaggctttcaaatgaggacactttaatacctgacaaacatgaacaagtattttgcagatactactcataatgaagcagacagcaataatataaagatggaataaaattcatctaacaaatgcttaatttaggtaaatactaaggagaactatattttcagagagatgccagatcatccctttattttttatttttatatatactttttgagacagggtctcactctgtcacccacgctggagtgcagcggcactttattttttatttttatataaattttttgagacagggtctcactctgtcacccatgctggagtagagtggcacaatcctggctcactgtagcctcgaactccctgagctcaggtgatcctcccacctcagccccccaagtagctgggaccacaggaatgtgctaccacacccagctaatttttgtcccacgctgggatcatcccaccttaaaaactctccttgataatgaagattatctttgaaggccaggcgcggtggccagccttgaaggataatctgatattactttctgctttagatttcctgcttcattaaggcaggaaaaaatactttccctctatcccttaaatgtgcacacagtgactaccgtaaatatttgtccattacttaacacttcaaaaagcattcctaaatagctaattctgcattagtttaattctattttaggtcagtctattaagcagttctacaatagtaaggttcagtacctataaaggaataatttaaaattcatatttatataatataccaaaaaagtggcttattttcttgctgcatgcgtttgccataactgtaatgttcttcatagtatcttcatattctttataaaaaaggaagtcaactaacctaatttcattctaatagagacatagcagtaactgctggtaagtatgtacttatttggaaagtgacttactcaaaattacacagtaactgagtagtgaaactaagctctgaaatctgttgatgctgtgaaggtgtaagtaatgaacacagtttggcatcacagagaaatcattggtgtaattatgtaacttttcagtcaagaattaagcatttactaaactactttatagtttttatagctaaagaaaagaagaaatattcctgagtttataacacaaggttactttatgtatcatattttaaaaagaagttctcatgtgtatacttgtgtactgagtaaaattataattgtaaatttttactgttcaaagataatcctttttttttttccttttttttttttttgttttagctggagtctcactctgtcgcccaggctggagtccagtggcatgatctccgctcactgcaaggcgcctccgcctcctgggcccaagggattctcctgcctcagcctctcaaataactgggattacagatgcgctctaccacgcctggctaattttttttgtatttttagtagagactaggtttcaccatgttggccgggctggtctcgatctcctgacctcaggtgatccactcacctcagcctcccaaagtgctgggattacaggcttgagccaccatgctggcctattttctaacttttaattatgttgtaacccttccatactgacatcaacaaacagacgtcgtatctaactgtcaaggcaacatgactactacaacagtaatgtctgtaagagtccatgttccatctctctcaatcactatagccaattacttgagcaaagagcagtgggctgggggcaatggctcatcctgtaataatcccagcactttaggaggccaaggtgggccgatggctgagtcctggagttcaaggccaacttgagcaacagggaaaaaacccatctctacaaaaaataaaaaaattagccaggcatggtggcgtgtctatagtcccagctgcttgggagtctgaagtgggaggatcacccgagcctgggaggacaagggtgcagtgagccaagaccacgtcactgcactctagcctgggtgacagagtgagaccctgtctcagagagaaaaaattttaaaagctgtgaataatccaaaataatgcattatttctaagtctgaaaataagcacacattcatactttatctcctgttattaaatctcaacctccttccatccctacaaattgacagttaacagtctaagacccagctaggtaagagaggaagtaaatgcagaaatttcacaagggtaattcaactgaccatttctctcaattatatcactgtttttagagttgacaaacatcaactactatgcactgactttctaagatcttaagacacaacgtaacaggaggttttatctaaaattaacaattctagaatgtcaaattagaaaattagacagcatatatgttaaaattgctaacttacgagaagtctgaatgaagcagttaaattctaaaatcagaaattatatccaggaggtcaagtacttcataacattaaataatacataggaaagaaaaaaggttataaaatttaaaaacacggccgggcgcggtggctgacgcctgtaatcccagcactttgggaggccgaggcgggcggatcacgaggtcaggagatggagaccatcctggctaacacagtgaaaccccgtctctactaaaaatacaaaaaataagccgggcgaggtggcaggcgcctgtagtcccagctacgcgggagactgaggcaggagaacggcatgaagcccggggattggagcctgcagtgagccgagatcgcaccactgcactccagcctgggcgacagcgagactctgtctcaaaaaaataaaataaaataaaattttaaaaaagcatttaacaacaacaacaaaaaattcaattttaggattcacctgagaaaagaatacctcaatactgctacactttcaaaaatgtttagaatcacataaaaattcacttcaataaaagaatgcttctgcagtttggggataaaagtttctaccaaataatcagtccctaaaacgctaaaactaaaaatttgctacaagaaacttttcatgtaatatttaaagatttttagaattaccaaaattaaatgtagatctgtttaactcctatcaattttaggtatcaccacaaatataacattctcttaatgatggtttcttaagactgggcacataggctcacgcctgtaatgccaggatttggggaggccaaggcaggtgactgcttgagcccaggagttccagaccagcctgggcaacatagtgaaacctgtctctacaaaatacaaaaacctgtagtcacagctactcaggaggctgagatggaaaagatcacttgagcccagggaggttgaaactgcagcaagccgagacagcgccactgcactccagcctgggtgacacagtgagaccctgtctccaaaaaagaaaaggtttcttaaaacataatttaactgtaatcttacttggtgatacattacttttttctaggaagaaacaataggaaggaaaagaaaaaaagaaaatgagtaaagaatgtctcaaagggatcacataagtctgaaaaccactatcttgaattgtatatggcagaactctagcaatattagggagtagagcgtccccagcatttacaggtgtgccagaatattgatctcccatcccgggagtttcatgaggtgctgcctgccaggtgcttctagcctcccaatctcatctactttagtgtactattcaaaacttactttctatgtgggcagaacctaaaagatggttgagacgcactgacagaatacattaaagcagttactagctcaactttaaaatacatactctccaataagaaattcaaagtctacccttacttgttttactcattaccaagtaatgaaatcccatgttacatttgtataatatggcattttaaaaaaaatacagttcctcttagagcttaagtaacttcagcagcagcagcaacatcctggtgtgggttagataaatctactaaaagctttttgggttaaggacatggtcattccatgttacagcttattttttcctaatcgaaatccccaaatgatcaatttcctagtcttcttccatgctttttctccactgcactatcaccttctaatataataacacacttggccgcgtgcagtggctcacacctgtaatcctagtactttgggaggccgaggcgagtggatcgcctgaggtcaggagttcaagaccagcctggccaacatggcaaaacccagtctccactaaaaacacaaaaaaaattacctgggcgtggtggccagcgcctgtaatcccagctactcaggagactgagtaggagaattgctagaaccctgggagcggaggttgcagtgagccaagatggcatcactgcactccagcctgagcaacacagcgagactccatctcaacacaaaaaacaagaacaaaacacaattaacttaaatatgctgttcttatctgtctcttcttatgagactatttattattaaatccatgagggcagaaatcttgtctgcttttgttcattgctataaccacagcaactagataagtgtctgacacatagaggtcccccaaaagataactggctcagtgaataaacaaagttgataattttattgaagatttatgtataatctagttgtcttaaaagagccaaatgttgccattaagatagtcaggatataaattctgtataacaaagatacagaataaccacacagaaagtagggttgtctttcaaaaagcttgacatatatattaaaatattcttaaagatactaccagcaaatctgcactagatattttaaaatacaaataaaaagggaaagacttttcaataaatataggaagcatccgttttccattcctctaaccagaaaacacagaagaatagagagtgataagatttcgatggaacaaggtgaaggaaaaacttaaaagggtggtaagagtctgagatagtaatacttagggcacagaaaaatgcactattgcactgtcaatcaagtatttgtttccaattcttaagacatcatgtaggccaggcacggtggctcacacctgtaatcccagcactttgggaggccaaggcaggcggatcacctgagttcgggagttcaagaccagcctgaccaacatgaagaaaccccgtctctactgaaatacaaaattagctgggcgtggtggttcatgcctgtaatcccagctactcaggaggctgaggtgggagaatcgcttgaactcgggaggtggaggctgcggtgagccaagatcgccccattgcactccagcctgggcaacaagagcgaaactccatctcaaaaaagaaaaaagacaccatgtaaagttcaagttcaagattaccaacctctctcttacaaacaaatctgccttttccagatactaaatctaacgagatgacacactacgttctcttgtcaaatacaagtgttgtggattttaatcttaatgtttagcctcaaataatgttttaatcttaatacagataataatcttaaacttgtcataaaaaatgttttaatcttaacacagataaaaatctttaagtggtaatgtagcctattgcatctactgttcaactagcattccactgttccttttttggcctcaaatgacgaaacttctccaacgtctctggggagactagtgtaaagtataatgtttcctgaaattgttcctgttttttccctgcaccattcgtgatatctcttcaactagaaatgttacataaaacttttctgttctgcaggcaagtccagagggagaagcaaggtaaagagaatattgtaaggaaaacaggttgaaaggggaataacataaaagcacaggagtaaatgtgaagcaaagctatatttgtacaaaagaggaagaagatgcagaaaagggaagaaaaacacttttagcagagtaaagaaaaaaaaatggaggaggaacagagacttgcttcttccagaaacaaaagcaaaaaacacttctaagaaaatgtggtctctttacccaaggggatattatgaaaacgctaaagggtactcagctgacactcctattgagcgttctactttctcttccaatgcctttgataccgctagtcttcacctgtgaattaaatgcaggctacagataacgcactcaatccctgcacaactacaattgtggttgccatctttgcctggaaacaaaaaacaaaaaaacccacaactccctagattcgggaaaaaggagtaaattaagttggaaagccagaaaaccacgccttgctaagtcggggggatatggcacaggttaacaaacgcctcctaccaaactaaggttccactaaaggtctgggaataagggcaaagagatgtatagccttatcgcgaccgcaagggtggggccttgcagtgggaaacaaaatagaaggcaagctatcccgagaggtttaagggggctgaggactcggctctcgggagatcgcccatcaggcggtggacacggggcagcttcgagaggaaggagacagtggactgctggaggaatgtccgcgagaataccgaggctgatggaaatagaagatacccacgggcacaggattaagagtcaaagggaagaagagagggacggggccgagcagtctggggggcccggcgtgggaggccggagcagaggccgctaagcgccgtccgcagccagccgccttctccggagacgcattctcggctcccgcacactcagccccccgccgcccctgccccggcaacaaccgcgggcgcagctgtttccgtcgggccagggacagcgggggtaaaggcaaccctggggctggcgggcagcagactggcagcgcccgtgtgtgtgtgcggggagccgattctgagaccgccaacgccagactttgccctttcttccccaaccctcctttatcacccaacttcccggccggctggtgtccgcttcgaccgacggataccgcaccccccacaacgcctctcgccgcctcttacccctcccccgacgccctgagctgagggaaaacaggccacccggaccgatcccgaacccgcccgggtgtccccgaatcgcggacgccacccccgcccgaacgctggcactctctcggcggctccctggcccgcccagatgcagcaaactcctctcacctgcattgacgccatgatggaaccatccccccaagaccggcgaggccagagacgc

SEQ ID NO: 92 - DNA, 98766 bp, Homo sapiens
  source 1..98766: mol_type = genomic DNA
gacttaaaagaaaccagacatttattgtctcacagttctggaggctggaagtccatgatcaaggtgtcagcagaatcatgttctctcccacagctctagggaagaacatttccctgcctcttccagcctctgatgttcccagcaatccctggcatttgctggcttgttgatacatcaccccatgactgcatggtcttctccccatgtgtctgagtctcttctccaattcttaggacaccagttatattggattaaggccacattctacttcggtataacctcacctcaactaatgacatctgcaatgactctatttccaaatagggtcacaatttgaggtactgggagttaagacttcaacacatcttattggaggacatgattcaatccgtaatagatagtatgaaggcagatttcagttctgaaaaaaaaatttatttatttatttattttttgagacagtatgtcactctatctccaggctggagtgcagtggcacaatgcaacctccatctcccaggttgaagcaatcttcacaccttagtttccagctacttgggactacaggtgacaccaccacattcagctaatttgtttgtattttttttgtagagatgaggttttgccatgttgcccaggctggtctcgaactcctggactcaagagatccacctgcctcaacctcccaaagtgctgggattacaggtgtgagccacgacgcctgacctggaagaaataactttctaataatcagatttattcaaaagtgcaatgattttctgagttaggttaatccctgtaaatgaaggtgatcagggtgatcgcttcaaagacattcagaaataatttattcattgattaggcttttggactagaaagtattaaattcctggctgagcgcggtggctcacgcctgtaatcccagccctttgggaggccgaggcagttggatctcttgaggtcaggagttcaagaccagcctggccaacatggtgaaaccctgtctctactaaaaatacaaaaattagccaggcatggtggcatgcgcctgtaatcccagctacttaggaggctgaggcaggagaattgcttgaacctgggaggcggaggttgcagtgagccgagatcgcgccattgcactccagcctgtgcgacacaatgagactcagtctcaaaaaaaaaaaaaaaaaaaagtattaaattcctttccagctattagttaatgggcaattaacccataaactgagtaaaatcatcacactaaatatttcactatcattgctacctaaaaacttcagctcccgtctccacttactaattgactatataagctaccatactcggtgcaacgggggaatgcaaacacatctccttttctcccaaacctgcttcttctctttgtactttggtgaaaactatcaccctcaactcatttgtccaagcccaaaacatagtggttatctcaagtataagtgtactgactttcagcatggattttggaatttgtccgactcaggtttgggttttttttttttttttttatttttaaacagtgtctcgttctgtcatccaggcaggagtgcagcgatcttcttaccccagcctcccaagtagttgggaccacatgtgcagaccaccatgtctagctaatttttatatttttgcagagatggagtttcaccatgttgcccaggctagactcaggttttaaattctagctccatcacatttaaagtgtgtgattttggacaatttgattatggctgaatttgtccactttctcataccttatttcaggcagccatcatcctgtctttattactaaaagcctccttttttttttttttttttttttttttttttgagacagagtctcgctctgtcaccaggctggagtgcagtggcatgatcttggctcactgcaacttccacctcccgggttcaagcgattcttctgcctcagcctcctgagtagctggaactacaggcatgtgccactaggcccggctaatttttttttttttgtatttttagaagagacggtgttccaccatgttggccagaatggtctcgatctcttgacctcgtgatctgcctgccttggcctcccaaagtactgggattacaggcatgagccactgtgcctggccaattgtgttttttttttaattgaggtataatgtacaataatctacaaataaagtgtataatttgatgagattgacatatacctctgtgaaaccaagacaatcaagataatgaacatatgtatcattcccaaaagtttgtttcttcccctttgtaatctccccttcccgccatcccatttccctatgcaaacatttatctgattctgtcactgtaactaaggatgcattttctaaaattttatgtaaataaagccatacaggatgtatgctttttggcctggctatattcactcagcataaccgagatttatcaggattcatcaacttcattacatgtatcaatagtttgttcctattttatgactgaatattattccattgtatggagagttgcttatctgttcacctattgatggacatttgggatgtttctagtttgggcagattacataaaacataaaatgttttatgtttcatataaacattagtgtacaaggccttttgtggacatatgctttcttttctcttgggcaaatagctaggtgtgaaatggctgatttgtatagtaggtatgtgcataacttttaaagaaactgccaaattattttccaaagtggttatacaattctaaattcccacctgcagtgtaggagagtttccattgctccacatccttgccacaacttggtatggtcaatgcagtgggtgtgtagtggtatctcatcattgtttttatcattgtttttatttgtattttgctaaggactaaaggtgttaagcagcattccacgtgtttgtttgccattcctatattctctttggttacatatcagttcgagtaaaaaacaaaatcacccattacttcattgggttttgttactgaattttaagttctttaaaaattataaatatatcctttatcagatatatttgcaaagatattgtcttgttttcatagtttgtcttttgaagaacctgtttcaaattttgatgcgtccaactcattcttttagaatttgtgtcatagttaagaaatctttgtcaaatccaagacctcagattttctcctttttgaagttttattgtttttgctctcaatttaggtctatgattcattttgggctaattctgtatacagtgttaggtaagatttttgttttttgcatacggctttccaaatgttctaatgcctttcgttcgatggagtattgcttcacccacaagtgccttggcatctttttttgaaaatcaattgaccgtatttctggactctctattctgttccactatgtctatctttattccagtagttcatattataatcaattcaagccatcatcctttgtctggattactgaaaaagcctcttgggttctgctcccatccccacatccccagctctgtgactcttccaatccattctccagactacagccaaggccaaggtaatttgtccaaagtgcaaatctcattccaccagtccctttgcccacacaatattaagtcaaaactttataacatggtttttgtttttgagatggaggcttgctcggttgcccaggctggagtgcagtggtgcgatctgggctcactgcaacctccgtctcctggttcaagcaattctcccacttcagcctcccaagtagctgggattacaggcacatgccaccagcctggctaattttttgtatttttagtagagacaagttggctaggctgatctcaaactccacacctcaggtgatctgcccgtctcagcctcccagagtgttgggattacaggtgtgagccaccacacctggccataacatggttttttaccactctaattcaatgctcccaccacactgttctttatcatacccgggtctttgcagtgtgtgcttatacatgccctcatcttcactctcccacctttacctggcaaatactcatcctgcagtttgtcatgttccctgaattctttcttggactccatgtgttgatttttcctgccttgatgctcacccagcactctgtgattaccccaggataccaagtgtcaaactgtatttcaattacctgtctgccttccctgcctgatcatagttccttgagactcagtaggcattcaatatttaaatgagtataaagacaaacaagataggttctcattcttcagaagatcccaagttaagccaggcagatcagcaaaccatatcagatcatgtcaaactcctctaatgctttctaggtctgtttatatttctgctggctgttaatcatggtgtcttatttcctagaatgtgataactttatgtcctaggaagaaagtatcttcctccagagaggatattcatttgcttctgcatgtcatctcctgaggacactgccagtcagggaccacaccttaatccaagtccaaggcttgacattccctgaaccaccctagagtgggtgcaagtctgaatgatggctggtttacttagctgatctttactatgaagtagacctactgggtctagctttaaattatttcttggtgggtgggatgctggggtagtacttcagactccttgttttaggcatatcctgggcaactatccttgtgataccgcccacacagtagctcagtttcataactatttcttcccaattgataaatttcctgaggacaaaagcaactcttagttgctgggctcatctctcagctaatggaaactgaaggaccaaataacttcaatcttaccctgactcacaaggacctacatcattccaaatactctgctcatcctgaaccagtcccacagtcctttgtactgatcttcatgcaaactcctctcctgtcctagcattttgtacttgggaactctgttcttgcctgaaacccatctacaaagtttacatttttcaggtcatgacaatatttttattttttttagatggagtcttgctctgtcacccaggctggagtgcagtgtgtggtctcagctcactgcaacctctgcctcccgggttcaagcaattcttgtgcctcagcctcccaaacagttgggattacaggcatgtgccaccatgcccagcttttttgtatttttagtaaagatggggtttctccatgttggccaggcttgtatcgacctcctggcctcactgatccgcctgccttggcctcccaaagtgctgggattacaggtataagccatcatgcctagcccatgacagtattaaagaaaataaattcagggggtacacgtgcaggttggttacacagatccattgcctaatgctgggggtttgggctctattgaacccatcgcccagatagcgaacacagtacctaatatgtagtttttccaaccctggcacccatccactctcttttagagacggaatctcgctctgtcccaggctggagtgcaatggcatgatcttagttcactgcaacctctgcctcccggattcaagctattctcctgcctcagcctcccaagtagccgggattacaggcgcccaccaccacgccgttattttatttttagtagatacggggtttcaccatgttggccaggctggtctcaagctcctgacgtgatccacctgcccaaagtactgggattacaggcgtaagccactgtgcctggcccatctttatgcatgacagtacttttcacagacatgtttctttgataatcagaaactatctgcacctcttaaggcttgtcacattttatatgatatgcttttctatttattatctcccttattacatatgccctttgaagatatatacctcatctgccatccttcttggcatatgaaaggcacacaataattatctgcttaatgctggtttttaaactctatgtcaggtttacctttatgattttatggttcctgagatgtatttagtttaaaacaattaatttgtgacaagcaatttgcctcagagataaagatatgagaaacacctataaaaaaagccaaaaccaatgaagaatgattaatgatttatttaaaagtagttttctcaaactctctgggatagaaagagcagggtcctgttatacattttactcaggtggtggttctggatatatgtttcaaaatagctagcacctaagtttctttgagaaagctaggataaaaatacaagcataaccaagttaattcaatacacacttattaaatgcctatgtgctacaggtactgtatactaggtactgtgtgctacgtgctggggacacaaacacaattgcaacactgtccctactgttaaaaagttcaggatagatgactggtagggagagaagaaaggacaaggatgataacctttcagctacctttgaactagacctttcaggtagaaacgcagatcatgaacattctaggagggaagaacattagcagacggcagtggaagcttgcattgctactgcttatgaaacaaggtttgtggacagctgaagagcagcctagggacaccaaggccaggtagtgaaaggccctaatggtaaggagactggagagaaggtagaaatctcagagacattttaaagttacactcaacaggacttgaaaaatgcaaggagaggactactgagtatcattgcttgattaagttggatgggaatgtcattaaattataacaggataaaagaaatatgttttcattgaggtatggaaacataaaattttaatgttgaattggctatctgcaggatacagccatctatattaggatcttgtctaatgacatatattcacccacattaagtccctgaaggccagatacagacatgagaagatatttcctaccttagttgataaactttccttattatttccataatccacttaactgtaaagggcgtagggattcccacttatgtattttgcattatgcaggcaaacattaaaaataaatcttacaggcaactaaaaaaatggttgaaaggggctcccaacaggacagataaccacagtggctttgagctttgttgtccaagtacacaaaactcttagctgtctcacttgcttcttcaatttagcttatgtttaattttgttacgtgttatgttagtgtgaaaatgagtaagaaatatagggaggacataaacagagtcacttatccagggtagcttaaactaatggagaaaagtcaaatcctactatggaaagtagaaattaaggattataataaaggaaaagggcatcatcaaagtacaaaagatggttcatatatttatctaaccatctactaacatagttgtgtaggacggcaggaacagcttgagacatgatcgtttttatggcagaatggctgcctcaatgaggactaaggtgctcctggggcaagcagatcccctgcagaaaagcttagaattaccagcagagcatatttaattcctcctgtcaggaataacagatgctgagatagccccttcttgtggttatttctttcctcttcttgcagcttcaagagtcactcatttaagtcattagttgatctgtttgtatactccagaaagcatccagaagttcttagagtatgcccttaattgtacaacttgaagttcaggaacatcggactcacgataactctaagcaagtgcctgggtctccatttccatcttcactgaaaacactcagtctttagttgggacttattaaaacactaaaactagctacatattacataaaggtgatgtgttaaatagatggtttaagtgactatcttcattctgttgcactcattttggaaatggacatgttcctgtttctataatcctttaaaattcagtcttttgtgaagagaaactactgtacaaatacttttacgtcataaaccaaaaagaggtctggtatctatcccatttagtattcaagtctacagaaaaaatccaataacaactgctttattattaaaagttatgaaattccataaagcaaagtaatctgcattcaactaacaagtctgatacatgtattaaaaaatatataacatagatttgtctgttttaacatttatattctatttaaaaagtagtgactttacatattttgcaacttgagtttataaaatatatacatccaccctattcaaatcctcaagcatgagctttcattcctattaataaaatgcacactctgtagttctgaataataaaaggaaaatggcaccaactaaaacaaacaaattcattttgacctgaacatgcatttagtttttggctactaatcaacccaataatccattttaccttgaacctgaccaccaatttgcctttacataaacaatctgtggttaactatgaaaagatgcattttcatggtatctgacacaatttaccaagttccttatggtagatttcaggctttaaattgtaagtttcaggcttcaaaagaggcaggattattaaatctttccatacaccagaaaatctgacaagtgatgtcattttgaaatcatgcttttgcctttgagaaaacaacttagaattgttgtaggaccaatgagaaaacaacttagaatcgttgtaggaccatccttttctcaaaacccagagagtgtatgtgccaaggactagaacaagaattggatctctccttttcccagtcaactcctcactcaccatattaaaactggagttcttgaggtatgttaagatagatcagcttctattcaggcattccttccacatactcaaaataccctcagatattttattaacaaaaaatttttcataaaaaaatagtcatttaatcattctagagactcatcacaaaatacaagtcacaatattaacatatgaaaattaaaattacaattaacatctcaccaggatcaaagaaccctaacttcaactttcaggatagagagctaagtttcaagtacatgtctagattctatgtgcctctaatgataatgatgtacataaacctgtcttaaatcggcaaacagacgaggcatggtggcttgcacctgtaatcccagcattttgggaggctgaggcaggaggaatgcttgagcccaggaattcaagatcagcctgggcaacatggtgagacctcgtgtctttaaaaaaaaaaaaaaaaaaaaaaaaaaaaaaaaaaattctatccatccaggcatggtggcacacacctgtagactcagctacccgggaggcaggaggattgcttgagccaaggtggtcaaggctgcaatgactgttccactgcacactccagcctgggcaacagaggaagaccgtctcaaaaaacaaaaaacaacccacacacaatttatgttgagaaagcaagtctcccacaaattatttttaaaaaatgattccaggctgggtgtggtgggtcatgcctgtaatcgcagcactttgggaggctgaggtgggcagatcacttgaagtcaggagttcaacaccagcctggccaacacggtgaaaccttgtctctactaaaaattagtcaggtgtggcagcacatgcctgtaatcccagctactcaagaggctgaggcaggagaatcgcttagacccaggaggtggagattgaaatgagccaagatcgtgcactgcactaaagcccgggtgacagagcaagactccgtctcaaaaataaataaataaataaataataaaaataatcattccacatctcaaaatgacttagaaatttaaatggaaaaaataaataatttgcttggacaataatttggctttgggagagtcctcatccgaaaataacaaaatttccttaatattagtactaaagaactaattacagctaacagctcatttaccaagtagtcaattattcaacaaatttagccatctactgacaaactgaaattagtatcagaaactccatgtattttatttgtaggagagcattttaaatttttcaaaaattcatggcataattttaataatcgtccttctgtagaatccctaacctcagaaaaaaaaaagagagaataaattagaagtgagaaaaggaaactgcggaagactgacacattggacatcagtgggaagaggcagaaaaataggaagaaaaataaaggacagatttaaaacaatttaaaaaggactacaaagaggattggggccagttggtgcagattaaaagacaccttcttcacagacctcaatcatgcacaggcagtaacggcattactataacacagaacagtatagtagctgattctgataatgaatcctcagaaaagaagaatatggttaagcttcagttctttttgaaaagcaatttacatacacaattacaaataattgtaaattttaagcattcagctaagatatgtacaaaaaaattaatgaaagtgagatcaagaaatataagcagcagtaaccataaaggcttagaactagtgacactgaattctttatttaaaaaaatttttgtaacacacagtacctcctcttctcttctatttttaggaagaagttataacaagttttaaatatctcaattctgaaaaacaataggcttttaaaaaataagacttgattaccagaaacaagtaatatgtagttacataaccattttcatatcactactcatttccattatttaccaattcatctttgatgcaacttggaaacaattaagcagtcactagacacctgttttagaatctgaagaaattattatccaccacaggaatctaatgatatatatatttgcatatatttaaaatttcatgagggaaaaggtaataaactattctagttattttataccaaatattgatattcctagtcaaaacaacaaggaattaagatctttctccaggtgaactgctgactatatagaagctatttccagcactttcttctggggattaaaaatgatttatttccctgctggctaaaatgataaattatatattacaagtaagtccttcagaagtgaatattaattccttaagagaaccataaaatgtatttttaaaaaattctcttaaaaactgaaaacaatccttctctctaaacctatggcattaatccctacttgaccaaagaaaaaaaaaaaaaagaagggcatcatgttcatgatctaagcatgcataaataaggaagcaaatgtatcactgtcttaatagaatttggcaaaccagaagaatggcctaaaaataaataaataaataaataaaagaagaagagtgtaccttatcttctaagtatgaaagtctaattctgtaggcctatgtcgcaaatagtgccccacgaggaaatgcagggaggaggcaagtagcatattcctatatacattttcttgatattctggttgtctttcaacaatgcattacagagaaatattctttttattattacaagccattaattgctctctgtagagcaatgactcagataaatgccttatgacttttaataatgtaactaacatataaattaaatctaagtgcaaggagttttcaatgattcctaaattcaagagagtgttgttagcctgattatgaattttaaatgtctgtgctcctatattttaggatatttcatcttattttctactctttaaaccataagatgtaccgaaattatttcattttcctctactttcctctgtgtcattttagtttactttatggtatttatatgtagagagagaggtatgttaaaatattgtcataaaaaactcaattgaggctatatatgacctattactctatagtatagcattgttaatctttgactcagtatattaattcctttggtgaataaatgtcaccggtcatttctttataaaagcattttggtaagagaaccagcaatatggagacagatttctccctaacccccagaagaagatcaagtcaaacagtagtgtagagcagttacgcaaaatatgaaaatacataatttacagctgcaattttcatattaaaagcagtttaaaactatgagtaattcaaagactttctgtcttggttaaacaggccaactaataaaactgacagagatcattgtgagaatttatctagtcaagatagaacaaaaacggttataattttttaaaagtggtaattgttaactagcagtatataaacagtgtccacaatttggtggctggccacggttttaattttttttttcaagttatttctatagcagacatatttttgaagtctacccacccctgagttcagcaattatactttgagtgtaaaattatatgcccttaattaacaacatgtacaaagctacaaaatgtcatctatacagattaaaaacaattttaaaatattatttaccaattattgattgaatggttttactggggtacgtatttcaaacctttcagccaactggctttcagttttaagcccaaattgattcatatattcactgcaggatatttcaaaaagagtgcaacaataaggcattagtaaaaataacattgtagtagaaacagattttgcatatgtgaaaaggtaatttataaaatacattaatcactttttaaaaagaacttagttgtagtatcattaactcacatggtactgagaactggacctttcaacaattttttttttctatagaaagtttcatctagctgtaagcaaagtcttttcaacaacaacaaaacaaaaccctccaggaaaaactatatggctgtgtgagacaaataagcaaccatttgatagtgacttttgcctaaattttaaaataaaaatgtccacactcttttgttaaaacattaagcctctgtcaaaaatgtatttcttattttagggtacaggattaaaggacaagatgatactcacaagtaaagaaaatttacaagaaaaaacttaacaaaagtttcaataaaagtattgtaacattcaaacttgacttataacaaaagaaacaagattgcaaacaaaaatgtttacggggtttccaaacataaataaatgaaatagtgtttaggcagtagggctcatgctgatggctagcaggaagttaacagagtgtaacttacttggaaaaaatctttaatgtacaaataacaagcccaaattatggactgcagcaatttaatcatcactgccatttttcttacttccaaaataaagccttgattaaaccattcataccctatattactcatacctttacttcagagattgaggaactatatacaacaaattaatttattttcaccatagggataacatactgtacctctctgccaatgttacttgaaaatcttccatgtcaaaacaacttgacagtagatataaacaattcaataaatatgcaatgatctttcattacagtcctttaaagacgcatgttaattcatgctgttaaccttaggatcacagtgcatagaatccaaatataaacagttggggtgacttttaaagtaatgttggatccctcactttatttatattcccactataaccagtaagttcatttcataggccctatcatgcattaatcattgaatggcaggagttaatgaaaacttttcctgttacaacgcccattgccggcaatgaacgtaccaaaaccgccaaggaagtcattgttattgcacaatacatgaggacctggagcttttccaaaagcttaaaaaaataaaaataaaaaatggaattatatttgacatttcctgacacctgcattaatactgtatgactaataaaagcatgtcagttgcctggactgaaccagcgatcaacatgcgcccagaatgcacacgagtaaaaatgcagtaaaaggaagtagtcttcattgcctataggtcacttccagtcaaaggttaaagttcaaagactgaatgatcaaagtgctcattttctcagtaggactatcttctgctaggaggatgataacagtggcatcaacaagtatcatctttaagaaaaggagaaaaaagataattaaaaagtcaagcatgtataagtaaattctacaagtctgtttaatgtagaaataatttcaattagcaagaagtacatagtttacatgtctgatctgcctcccccaaacctgtgaatacaaagtgcaatatatgttcaattatacagtgacaaatttttattctttcagagaaatagttcacataaaccttaaaatgatatgttattagcacattctatttaaaataataaactgacatgacatgttagtacatagtcaggatgtatcaatcttaagagaattattttatgggcaacaagttcacattgtaatgagacagaagtaaactcctgatcaacagtgccatgctatttaacacagaataatacacaatttgtctttagactgtgaaggaagtaactgttctttaccaatgagatacaatctccaaatcaataaacagttaagattaatttccctttagaaaataagttttcaggccggacacggtggctcacacctgtaatcccagcactttgggaggccgaggcgggcggatcacttgaggtcaggtgttttgagaccagcctggccaacatggtgaaaccctccctctactaaaaatacaaaaattagctgggcgtcgtggcacacatcggtagtctcagctactcaggaggctgaggcaagggaatcgcttcaacctgagaggcagagggaggctctgtctcataaaaaaaaaaaaaaagaaaaaaaaaaaaagaaaataagctttcagcaagtatagatacatatgcaaatggggtcattaaaaaactcatgaaattatttaataataacttctggtagcctcaacacatatatatgtaacacagacaactttaggattatttattttacaaaatttatttcacaaaacatatctgaaagatttattctgaggatgagttattcttcagaaggaagctacataaagaaactaagactggtggccaagagttgtgaaagcactcaaggaaaaaattctgaaatcctagtcaaaatattttacagactgatatggtttggatatctgccccttcaaatctcatgttgaaatgagtgatcccccatgttggagaggggcctaatggggaggtgttcgggtcatgggggcagatccctcaggaatggtttggtgccctccttgcagtcattagttcacatgagatctggctgttaaaggggctgggacctccttcctgtctcttgctcccttctattgccatgtgacttgcctgctctcccttcacccttccaccatgagtaaaagcttcctgaggcctcaccagaagcaaatgccagcactatgcttctctacagtcttccaaactgtgagccaaataaacttctcttctcataaattagtctcaggtacttcttcagagcaacacaaaacagattaatacactatctcatgttagaattgatatactgctaattaaaaaccagtaaaatctgacttctaagctgggcaaactcatagagtattccatgatccagtaatttcaagggggaaacagactggagtttaaaaataaatcatccctaattcattagacgccttaaaataaataagaatagtatctttaagaaaacaagtagtttatatcctctaaagttcactcacaattttcttggcaatgcaaagtggctcacgcctgtaattccagcatttggggaggctgaggtggatggactgcttgggcccaggagttcaagaccagcctaggcaatacggcaaaatgttgcctctacaaaaaatacaaaaattagcctggcatggtagtgcatgcctgtagtcccagctacttgggaggctgaggctgaggtgggaggatcgcttgagtctcagaggttgaggctgcagtgagccgtgatccctagccaacaccatctccaaaaaaaaaaaaaaaaaaaaaaagggggatgttctttaaattattgtggtacttgaaacagacagagaagatatacttgttatggatataaaacaaacttaggaatattaataagttccttaaaacatcgcttctgcaatagagtaacaatagggttggtcgctgaaactaacactaaaactaatcatactcaaatctctaagctaaaagatggcactaaaattctacctaatatgtcaaactactggggataaattttaaggtgatacaagataacaatatatacaataagaaaagtgacagataaaattcaatttgaacataatgttatccagttaactaccaataaacttgtatctccaaagacataccatctttgacaggtggtagcacaaatgcatctttatttactaacttgttcattgcagaaggtttttagtatagtaggttttctgtagaacgtgctaccaaaatgattaggaaatctttgtgaagctactttccagatcccaatccctgtttctgactgatatgatactacccacctttgaataccctcgttttgaagaaacaaatgatctgtaacagctagatcaacagggacttgcgggactacgaatccatgatggctatatgtaatcaagagtttataagcaaactttaagtatagatacaactatgagccaaagccatcgccatcctttttctaaataggatggccataactaagaagcaaaaaacttatccgttactagaaagaacatagtttgctagccagatgaaagtattattggataccaggacaaactcaccccccaaccaaaaataaataaataaaaaataaaaaaaatcagagtaacccattttgggtcaagacaaatacaggctgacaaaaggtggtaaaagaatggtatatttaatctcttggttaaagcatttgtaacaagataatggcctgaagaaaaatctaattattaaccatttatatttttcctggaaattcagaagcctctactaaaattacactttcaaatataacatacaagctgccagtttcaaagaggtgacacctaccatggctaacttcactgggcttctgagaaatgtaaatgagaaagaactatattagaagaaggtcatttagttttctcctgagaataaaaactatcatatagttttccaactatcatggaaacccatctccttggatatccccagggacagaagactagaaaaaaaaggaacacagtaatacaggtcagtggatatgaagtggatgctacctccaagaaagagaaaatatttagttttgtctctcaacaatttagggaattaaaattttcctttaacgaaccaattcaagagatatttcaaagtaggcagacaaagacttgttaatcagcaggaaacagaaggcacaaacaaactgagtaaaagtttggactcaggaatttagtaaatggttttataactccaaaagctggtacaaataaaaaagttcacaacacaggtaaatctatggacagcaactatacagcaggaagaaaaggagtttgatactactagtctgagacaattttatgcttctgccctcttgtagtctttatacttctatagaaatgttccagctgaacagaatcagaatgcagtccatggtttttaaaaaccgatattcctctacaccttccccaaattacagactcattttgttggatatgccatctaaacattgtgccaattcatttcctatgagcttaggtctctgaaaccaatcttcaacaaacaggagccttaagttacacggggtgagcatccctaaatccaaaatctgaaactttttaagtatcaacatgacaccacaagtggaaaattccagacttgacctcatgatgttaaacagttaaaactctgtttcatgcaaaaaattatttaaaatgctgtataggtccagtgtggtggctcatgcctgcaatcccagcactttgggaggctgaggcgggcagattgcttgagtccaggaatttgagaccaatctgggcaacatagtgaaatcccatctataccccccaacaaaatatacaaaaattagctaggcatggtggtacgttgtctgtagtcccagttactcgggacactgaggtgggaggatcacctgagcccgggaagttgaggctgcaatgagccatgatcataccactgcactccagcctaagtgacagagtgagattctgtctcaaaaaataaatgaagttttgtataaaattaccctcagaatatgtgtttaaggtatatgtgaaacatacataaatttcatgtttagacttggctcccatccccaagatagctcattatgtatatgcaaatattcgagaaaaacaaattgaaacccaaaacacttctggtcccaaccatttcgaataagggatattcaacctacagtttataaccaaccattcaattttctaacactttaaggagaatggttccagccagccacagatctgtcctccccgctgtggaaagcaaatcatttatgaaactaagttgtatatgcctgatactgacctcagaaaacaaatggaccatacaactaatggactttagttggctacttcactgaaattatttttatggtctcacaaagagacacattcaaaagatactttctatctttcccaagaacaattatcatgtctgttttatgatatagaactctgaggcctcaatcattcatttattggtgcatagaactgtatgcagatctgttttctaaggaagattctagcactgaatcataagaaaattccttagcccatctatatgctgaggtgagttgtctattttgcatacctattttggttaggcttgttttttttttaaccctattctccctgctcaatggattattcaaagcataagaatcccctcccactcccgcactgccttaactggcaatgaataaatttgcatttcaaagcaggtatgacttcaatttcttagtgaatagaaactataaaggaattctggaaaacacattgatagtcaactacaagtaagtaataaagaaatgtgcagtcactatcaatacaactttttatttaatatatccaaagacctctaaacactaatgaggtgactttttacatggtaataaatcactgtgtggtaaataagaacctcaaaagaaataaatacaagctatgatgcaagcaaagacaataacagtggggtaaacagtgactggcctaattcttaagggattctaactaataatgtagaaaaccacaaatttaagctgagagaggtctcttccaagaactttacaagaccagtgctctaacccctgagctatggagcccttgtgtcttcttccaagaactttaacactggtatttggcagctcagctttagcatgtcagcagagtcctcctcttataaaaccaggaaatgaagcaaatttcagatttgttgtttttcattaactgtgcctccatcctgcatccagcatccaggaagtatatatacaatcactaatctaaaccaaacctctcttgcctctttgcttagatctgacaaacactgactcaccttgacccaagtatgtcaggaagcaccacacaggaggactgtggagcttgagacctgaggcacacaattccacttagtttctagaaactgaaatgctaagtgtttcagtgagtttatccaattcttagtaagcttttgttcagtttctgatctttctgcctagccttgaaagtcacataaggaaactggcctgttctgtaagcctttgaaaattagatgatgctaagaaacatcaagagtccatatgtcttggtaactaggtgttatactggaacaaagcagtataacacctagagctaagcaggaaaagatactgacttgtggaaagttctaataagaaaattaatgtgttatactttttacaagcgtatgattatctttgtaagattacccaaatttacctataatgccaggacaagctattattcacattgcctgtgactgctattctgatatatataaaggagaagacagtatgtgctacacagctgaaatgcattagctttttaaaagtgaaggaaaaaaaagtgaagaaaaagttcaaagaagattctctgcagccatcctagttggatgacagaacagctgctttaccatctcaatgtgtaacaaatatttccattccttgattgctatgaaactcactttcaaaacaaagttgtcccttaaaaggagaatggtggaggggaatgattcaaacattcagcattcaagcaagaggagaaaatatattaagagataagaatggtcatcgcaagtcaatgaaccaaggatattttaaacaaaattatctgtaaatgaaaaaaaaaaatttatgtacccaggactggggactggagtagaacagtcataattcaggtgagtaagaatccagtgccttttaaaaatagctcatttgcattgggggagcggggagaggtgaaagaggaaaggataactttaatctgtttattggaaaaactaattactgtatgaacttcagactattttatattatgtgaaaggttaatttggtttgaaagcctatttttttggtacttctcggcttacttggagattacgtgtctccaaactactaaaaagaactttctacttcagtcagcaaagtatggatttctcagtaacataaaaactgttaactctaagaaaaataacttctattggctgggcgcagtggctcacacctgtaatcccagcactttgggaggccgagggggcagatcacctgaggttgggagttcaagaccagcctgaccaacatggagaaacctcatctctattaaaaatacaaaattagccgggcgtggtggcacatgcctgtaaccccagctactcgggagctgaggcaggagaatctcttgaacccagaaggcagaggtgcggtgagccaagatggcgccactgcactccagcctgggcaacaagaacaaaactccgtcaaaaaaaagaaaaagaaaaagaataagaacttatatttctattataaattctaatttaaagaattaatccttatatttctggttttatctttccccatttcttattcaaaagcaggtaagaagaaactctgaagtattcttagatgaaagacttctcataaatcctttcaaccatataacccagcattagaggggctagaaaaccgattatctttttgaactttctccactagggagtagtaaataaggaaaaaataggaataccctctaataatggcatgagaaagtaggagagagggttgtactttaaaaaatgtgtacttttaaaaaaactcatcttctaaaacacaatgtcccctgaagttgcatgaaaaacctcaaggtggtttaaaaacacttgtaaaaaagaagaatctttcaattactagtgagattgaatctatctgaaccagaattactagagtcttaaaaacactgacacttaaaaataactatgtttgtcaatattcctaattggctaatcttaatttttgatgcatgtgggaactcactatagtaagataaaggagtttctgacactcaaggattttttttgtttgttttttaaggcttttttgtaaaggcatgaagaagcggcttagtgtttggtcctaaaaggcaaaagaatgtaagaaagaattaggcctgttaattaatgagtctatttggaaaccttgtcaaataatctcagaaacaatagttctcagaagactagctacatcagaattatctgagggtatcttaatgtaaacaaaaccagcattcaagtttattaggttcctcaaaggagggagtacttaacaaggctttggtgaaagagctcctaagaagagaggagttgtgtgtgtagtagaattaatttgaggcaaatagcacatgtagaggtaacagatggcagactaagaaactgagtatataataataaagtactacactgaatatttcataaataaaacttttcttgtgttaaggatgttttttaggacagattctctgaagtttaataactaagacaaatgtttgctcttgaattttaagcttgctaaatactgctaaactgcttccttaaaggattacactaacttgctacataccgccagcaagtatgaaaacaattttattctaccctttactctccccttcagtattgcatttgttttataaaactctgcagattcagaaactgtttcaaaatcttaaactggtaattattttactgagctgcacttttttgcctattttgttttttatccttaagtaactttcataaacggtttatttttaataagctataaacatttcaaaattttttcaaactttataacgatagtgctttaaagttaaagaagctgtacattttcatataattgaatgtttaatttctttgtgattccttttaaattcagaaattcttcctttctccagagagctgatacccaacattgaaaaaaaacatttttttggttatattttaaaaataggccaggcgcagtggctcacgcctgtaatcccagcactttgggaggctgaggcaggcgatcaccctgaggtcaggagttcgagaccagcctggccaacatggcaaaacccgtctctactaaaaatacaaaaattggccgggtgtggaggctcatgcctgtaatcccagcactttgggaggccgaggtgggtggatcacgaggtcaggagatcaagaccatcctggctaacacagtgaaaccccgtctctactaaaaatacaaaaaattagccgagcgaggtggcgggcgcctgtagtcccagctacgcgggaggctgaggcaggagaatggtgtgaaccctgggaggtggagcttgcagtgagccgaagttgcgaaactgcactccagcctgggcgacagcaagactccgtctcaaaataaataaataaataaacaaaaataaaaataaaaatacaaaaatcagctgggcatggtggcgcgcctgtaatcccagctactagggaggctgagggcaggagaattgcttgaacccaggaggcagaggatgcagtgagcctagatcacgccactgcactccagcctgggcaacagagcgagacttcatctcaaaaaataaataaaaaataaataaatacaaatactgaacccacaagaaatattttatgcagtgaaaatattccttctccaaaggattacagattttccaagatgattacttactaaataatccttccccttatcactgatttgtaatgccttatcatatattcaaatgttatattcaactgggcctaaataagaggaactgtatttcaatgatctgttcttctattagtatttttagtgtcctgtctggtagattaattctccattacctttatggctcaaaattcaaactttgttcttctcatctactatttttttcccaaacttttcaaacacctatctcccttcccacccccacaatcattcactggatttgtaatgaactccatcgaacctacagtttgtaaaatacacgtatttttatttcacagctcttaaagttttgccattttcttcttcttctaagtcatatgtatttcttattgatattaccccaaattttcacatttctgtctctcaggaacagcatatttctttgttttcttttttcttttctttttttttttttttgagacggaggcttgctctgtcgcccaggctggagtgcagtggcgcgatctccgctcactatgagctccgcctcctgggttcatgccattctcctgactcggcctcccgagtaactgggactacaggcgcctgccaccacgcccggctaattttttgtatttttagtagagacagggtttcaccgtgttagccaggatggtctcaatctcctggtctcgtgatccacccacctcagcctcccaaagtgctgggattacaggcatgagccaccacgcccggccacttctttgtgttttctaatttttaactactggcatagttctattgcactgactcgggtcatcttttcgttcaacacctggggaacttttaagtttttaattcactcaatttaggtgaggatacagaaggcttcacactggatagaagatacggggagaaggtcatagttcaattagtttttgctagttctaatttattatcaggttaacattaaaaaaaaaaaaaaacccacacacataaaaaaccccaaaggcaatactcttatgtatacaaaaatcacaggggatggtttttgtttacttgcttcaaaaactacattgaagaatacagactttttgtttttaatttcaaataactcttcagggaagcattaaggttagtttagaaatactagcagctctgaattatcattaccatcccaacaaatacaatagaaatttaaaattagagagtactttattaatacaactacaatcagcagaatctcacttttttttttttaagggataatgattagaatagagagctttctaatttaatgaggtaccccttactgtgactcccgcctcctcccggccatgaatactaccagaactaaatgaacaaacaaggcatcaaaacttctatttcaaacaacagacttcccagtaactagttcttttttttttttcctttggagatagagtctcattccatcactgtcacccaggctggagtagagtagcgtgatctcagctcacttcaaccttcgccaccagggttcaagtgattctcatgcatcagcctccagtggaattagctgcaagccaccacgcccatctaatttttgtacttttagtagagacgaagtttcaccatgttgaccaagctagtcttgaactcctgacctcaagtgatctgcccacctctgcctcccaaagtgctgggattacaggcgtaggccaccatgcctgggctcccagtaaatagttctaatttgatctaaagattattaacaacttcttttctgtaatacaatggtagagtctccgaatgtcaaagtaattttacattttacttttatgatggctatgattttgtttgccccattaaaaatctggtgtagtgctgggcgtggtggctcacgcctgtaatcccagaactttgggatgcccaggtgggcagatcacctgaggtcaggagttcaagaccagactcatcaacacacagaaaccccatctctactaaaaatacaaaattagctgggtgtggttgcacatgcctgtaatctcagctacttgggaagctgaggaaggacaatcgcttgaacccaagaggcagaggttgtggtgagccaagaataacaccattgcactccagcctgggcaacaagagcaaaactccatctcaaaaaaaaaaaaaaaaacaaaaaaaactagggtaattcatccattaaatatattagaatattttaaagaattttcttcatataacataaatataacaccaattatagcttctcttctttttcccaagtcttatagcaaatatatataatcttcatatcaaaatgctaaaaagttattacaaattcaaactgcttaccatgataccaccattttgttttctttggattcttgttacatgttcgcacataaaaagaattatccggtggtcgtctctgaaacaaaaaataatttaaataggttgaaaaacagaaaaactgagagggtgacagttttaataaaagcttaagaaaaattaacagaatgcataaaaaacaatataaacatgaatagtatatctaaaagaataaaaactataaatgtattccaggaaatgtgtatgcttaacacctaaatttaaaaaaggaataataagcgtgtttgagtgtggtctgtgttaggttctagcctggccaacatggtgaaacccagtctctactaaaaatacaaaaaaattagctgggcatggtggtgcgtgcctgtaatcccagctacttgggaggctgaggcaggagaattgattgaacccgggaggcagaggttgcagtgagccaagattgtgacattgcactccagcctgacaacagagcgagactctcgtctcaaaacaaacaaacaaaaaattaaataaattataaagggaatgaaaaaggactgatgagaaaagtcaaattcacataataatttaaacatagccgggcgcagtggtgggcatctgtaatctcaggtacttggaaggctgaagcaggagaattgcttgaacccagaaggtggaggttgcagtgagccgagatggtgccactgcactccagcttgggtgacagagtgagactccatctcaaaaaataaataaataataaaacaaagggccaggcgcggtggctcacgcctgtaatcccagcactttgggaggccgaggcgggtggatcacgaggccaggagatcgagaccatcctggctaacacggtgaaaccctgtctgctaaaaatacaaaaaaaaaaaaaaaaaaaattagccgggcgtgttggcgggcgcctgtagtcccagctaactcaggaggctgaggcaggagaatggcgtgagactgggaggcggagcttgcaatgagccgagattgcgccactgcactccagcctgcgtgacagaaccagacttcgtctcaaaacaaaacagaaaagtctactaaactagatttgttgggagaagtatagcaatgtacaaacctccacaaagaactgtttttactgtaatagaataccatcaaagatagaccagaagattcagtttctaaacaatatttaagagaaaaaatgggaaaaatatatattggcatttctactataattggcctttctgctgaacatatgccctgactagaacaatatatgagaaatatatggcagctccgcaagggagctaccgcagataaagtgatgccaacaacactgaagatatattatggaagagacttttcctgaaatttgttgcatactgcctagacaaaagaaaatgttaccctctacaaagacttggaaacatcaaatttatattaaagctatattaaagtttatagatactatgatagatatccttatcctttagtctcctttatgcctttcggaatcattccaataacttgattattttcctatcattaaatattgtatagtgtatatgcaggatttattttcagacttaaatctgcttagctaagctaatgaaaatgagagattaagggaatcctctcctctacctgaggctaatgaaaataagtgaatttggtatgacatcatttaaggaaagtctaaccagaaagcaatcgtgagtaggactctgtgatagcaggaaggaaaacagttagtccatttggcacttctaaaactcatatatgtaactatcagtctagttgagcctcacaatgctcttatgtgttaatattagtaatttcatttaacaaaaagaaacattagagcataagacagtcaagacatttaggtattccaagtcaatctgtggacacaatttgagaaaattcctaaaaaatgaatattatgaaattagatgcctgactacttcaaggaagggatgattctacaaagttaaatctatgttcatatggaattggtactactagagcagatactttcacaaactcattttatgtatatgttgattagaacccaagaatcatcagaaaagtcttcaaaaaatacatatttagaaaaaagaaatactcaattctatttgcttaaatcatttatctccctgacaaatgatcagggagatacagttcttggaaaagaaactatacaaaagaagtcttacgaaattgttttaggaatgggatacaaactgaaaagtttgaacaatgtaaatatattacaaaggcatgcaaataaagtggaatttactgaaagtcctgtgatctcaatatcagaaattatctttaatccactacaatctaatgacatactggatttaaataccttcagtttatggaaccactcctgactgtgtaaaaggaaattggaatagaagaattatgactaaagtcccaaacacctaaagtaaaatatttaatagtagtagaattaacaaagtaaagcccatagaaccatgtccactacggaataaaatttacccgttttaataataataaaacgtgtagatgggtatttaaaatacttttcttttttcttttttgagacagagtcttgctctattacccaggttggagtgcagtggcgtgatatcagcttactgcaacttcagcctctgggtttaagcaagtcttgtgcatcaacctcccaagtagctgggactacaggcatgcgccaccacgcccagctaatttttctatttttagtaaacagggtttagccattttgcctaggctgctcttgaactcctggcctcaagtgctccacccttctcggcctcccaaagtagtaggattacaggcgtgagccactgcacctggcctaaaacactttttaaggtttctttggagcttagatctctctaatgccagatcgtctcaatgccaaggcaaatttcctcttcatctttgtaacttatcacttagcacagtaaaagtagcacatactaggtacctagtaaatgttttttgaattttatcgtatttcatggaaatcttgatttctgtattatcatcttggttaaatattatacaactattacagtaaaaacatagtttattagtgctttaaatggaatgattagtcttatactaagtgtacaagaaacactagtagcagacaactagaatgtaaggggaatggtgagggttagaggaagatgaaggaagtacacagaatatagtcattctctagtttttaataataaatcattatatttaaatgtaaataaaatctaataatcatgaggcacatgcaagactatgtacagatatcgctgacattaatctcttaataactttcttattaaatactgttgttaccgtctcacctttctatagtctttaagcgtaacaggaacatagaaggccttgtacccacaaactgctttgccctacacataaaagtttaaaacgtgtgtgtgtgttgggggtgggtgagaggagaaaatataacagcaataagcaacaaatgagtaaaaaaacaaaacaaaaccaatttaacctattatttcacatgctgtggcttagagtgcttcagattctaaataacctatcattaaaaaatgaactattatcttaaaagttctccaaatactaatttaataaaaatgacaatcagttcaatttggagaaaaggaaagaaaactgtaaaacacaaataactccctaacctctagggcaaagctgtttctcctttaaacagaatgcaaaaggaaaaccctcatagggatttaagaggggttttaaaatgtagaaatacataaatgttatgctatactaacccttaagcaggaatgacaagagtgtcagaagtgtacagaggattcagatacatttaaagggtatcctaaatttatatgtatattttaaatttatttcattattattttcttgagatggagtctcgctctgtcacccaggctgtagtgtagtggcatgatcttggctcactgcaacctcctgggttcaagcaattctcctacctcagtctcctgagtagctgggattacaggcatataccatcacacccagttaatttttgtatttttagtagagacagggtttcaccatgttggccagctggtctcgaactcctgaccgcaggtgattcacctgcctaggccttctaaagtgctgggattacaggtgtaagccaccgtgcccagcctacattttaagtttaattaagtgattttttttctttttgttttttttccccccacttccatcagacatagaatctgtggattaataaaggagaacaggaagaaacgccctgaaaattcgactggtaaactggtcttcctccttcaacctaatcattaggacagggaagctctggttcctgaaaaattccctgaaacaggttgatcgggtgggagctggcagaggggagaaggaagctatgatgcacttttctgaggctttccactgtgaaatctacaaaaagaatttcttgtatacttttacctgtgcatgcttttgggaataaaatcagctttaagaaaataccgtacatttcctgtttaaaagaatataaaacagtaagtctggcttctaccccattcaacatgtaaaacttctatttggaatgaaaggtatcaaaataactttccaatttattactaaacatgaaattccctataattttcaaataaaaagcataaatccttcctccaaataaaaataattacatattaaaattatttatctacctaactgaaagaagagatattatctggaataattctgaaaagtcttaccttttccttgcagctggaaagcatgctaataatgctaagacaaactgattggactgagagcgctggggaccagtcttctgttagaatggataaacagatatgaccattgctataaacatgaggatgaacaggaatattttcaccagtaaacatgacctaagagagaataaaattccattaaaactcaaatattctctactaccaaaaactaaaatattctccacatataacaaatattgattataaaaaaacaaaaaaccaccaaaatcagtgccaggaacatgataaacaactgcttatttgtttactctcattaactcagtaagtattggtttcactgaacgaataaccacatagtagggaaaagatgccaaattattttttatttcggttatttttgataaattctccttaaaaattctaaactacgtattttttactagtgaaagacaactacatttataagaatgatttttcagattttgctcattgctctctgcatataaaaatcaagtatgataaaattccaaacaaaaatattcaattttgggaaaatatgaatgacaggtggtaggaacattcctcctactactacctgttaacaatgttagctctaaggcacatgtgcaaagggaaatgactgttatatattccacctcctctaaacttacacatccattatgatgggtacaagttactagctgttaatcagtaaataactatgtgcctagacgaaaaatacaaaagttgaccaagtctcccaatttgcagttttactctcctttcccttttactcaattcttctgtaacactgtttttcctttctctatcatgtctcagcaatgttttgaatggtaataaatctattatttccttcctttgctctaataattcaacaaatatcttaaagtagtttttcttaaacttatttacctaagcaaataggcaggagaataaattcatatatcctgaggaatctgtaagcatagtccaaagttgctcgaagaaagcagaagtcttatgtttacactgtgtactatatttattctacaggttagcagtaattcctaattcctgacctcgccaaaaatcaaacaaaaaaacaaaagaacacatagttggaagatctgcttaaaaatacaaattcaagtgtcctgctttcacagattctaatttagtaagtataattagatttttataaaacccatcagatataaaccaacaattcctaaatcagatttacagtatctcagccctgcaaactgcctcatacccaagtacaacagaatatcagtaaggagaaatcttaccttaagttatagcagaaactgataaaagatatacagtattgctttaggcatacccttttttctctttatagagcagaaaaaagaaccagtgaggtaaatatgaatagaataaggtatgctatagtttaatatggaatatgttataggaaattaccataagctaagttttatatatattttaaatatctagctatgaatctgattttgttacaatgttacaattttacaaagatttacatgttaataaagcagtctttcatatgagtagagtcttctaatatttcaaatatattaactaacatatgggacacatttccttggctaagactagataagacagcaaaaggcatttttttcccaaaggaacgattttccatacttgcatctatttcttttttttctttaaattctggacatcaactctccattcccactaataaaaaaaaaaaaaaaagctaaaaaacaaaagtaaagtctcaaaataagagaaatcaagtcacttatcctacctaattgcagaagactccctgaaaggactttgattttgtaatggctacgctctatgcatgacatttatctcaattacatctatcggtgctagtaccctcttcattactttttgctaaaaaaaagtattgctctgtaaaagaaaacaaatgcttacatggtcttatagttccacactggagtctgtccacaactgttttttaatgaaattttatttttcataaatatgaactatagtttattacatcatatgcatctgatactcccatgtgttgtagatgtacagaatgggagtttacaaatcttacggacatctaccttgaggtattcattttgccataaaaagccatttgaccagtaggatattttcattaaaacacaagcaatacccaagagtttcttctttggccacaattatttttttaaaagatatttttcggtgtggctcatgcctgtaatcccagcactttggcaggccgaggtgggtggatcacctgaggtcagcagtttgagaccagcctggccaacatggcgaaaacccgtctctactaaaaaatacaaaaaattagctgggagcggtggcacgtgcctgtcattccagctatttgggaggctgaggcaggagaattgcttgaacccgggaggcagaggttgcagtgagctgagatcgcaccaccgcactccagcctgggcgacaagagcgaaactcggccttaaaaaaaaaaaaaaagatatttttcccagtaaggtctctatcaagaagtcaagaagaatagtgatctgaaagtgccacaaaaaaaaaaaaaaaaaaaaaaaaaagaacaactgccaaattatcttctttggcaaaactgaatcaccaacctttaaagaaaatagcaacacgaaggttactacatcatgtttcacccagccaattcagagcacaaggagaacagtatttttcctaaagagaaatggttataaactaaatcacttggcctgagagccagtaagtaggcatgaaccaaaaggtactcaggagagaagagaaagaaaagcgatgagtagcagtagaaaacacctacagcagatgcagcagatattctgtaagcaaagagaaccagtaatgaagaagacagaaacaactgtgaagtagaagaggactgagataaaaataattcagatctcaataacctttaaataaaacagcaggggctttttaacatactgcatgcagggcaaatgcagccaccctaaaacttttagcaaccaaaaccaggggaattgcatgtaataggtaacccttagggcctaacctgccagatacagaattttagaagtttgtctaaacatataaagggtgaatttacatgccagaggtgaatttacatgccagaggtgaatttctgaaataaaaggaaatttttttcaatagttcattcacataaggggcaaataagcatagtttccacagatggttttttttttttctttccccagatagagctttgctcttgttgcccaggctggagtgcaatggtacgaccttggctcactgcaatccccgcctcccaggttcaagtgattctcctgcctcagcctccacctgccaccacacccagctaattttttgtatttttagtagagatggggttttaccacgttggccaagctggtctcgaactcctgacctcaggtgatccacccacctcagcctcccaaagtgctggggttacaggcatgagtcactgcacccggcccacagattgttctaatgtaaactttgctaatctggttctctgcatggggaaagtaaccaaggcagaatttcttcaactgcatactgttagccatcctcatttatttaatactcactacaagccaaaggagaaagtgaatgtttcagttttttaactcagtcaagtagtttctacaaacaagaaattattaagttgtttctaaggttcaaaaaaatttttttggagtttcaagtagctgacaaaactgactagaaccgatgtgacaaaacaactgaacacaataaatttgaaaccatagcaactttgcgaatgtattcaaaatagtcatatgaacagccaacgatggagaccacggacattcctcgctgcgtaaattacactaagtaaaatggaattacagatttttaaagaacgatttgatggaaatacagttttagaaaaggatcttagaccgaatgtacatgaatcaagtttgaagttgcattagaaacagtctttttttttgagatggagtctcgcactgttgcccaggctggagtgcaatggcccgatctctgctcactgcaagctccatctcctgggttcatatgattctcctgcctcagcctcccaagtagctgggattacaggcgcacaccaccacgcctggctaattttttgtatttttagtagagatggggttttactatatgttggccagactggtctcaaactcctgaccttgtgatccgcccgcctcggcttcccagagtgctgggattacaggcgtgagccactgcacccagactggaagcagtctttaattattactacctttccaaacatctcccgagcagtatggcttattcaaaagcaagtgagagctaagagagaaataattatgctcagggtatgtatcattttggagataagtatgtttatcccacaaccaacctgaaattttaagcaggccaatctctgggtaatttttgggtactgtgaatgtagtgcctttcataaaactactaaaatctacactgaaagccaccatagtgataaaaataaaaaataagaatgaacaggggttggggatggtgactcacacctgtaatcctagcactttgggaggtcaatgtgggaggatcacttgagccctggagctcaagaccagcctgggtaacaaagtaagatcccatctctaaaaaaaatagtaactagccgcatgtggtggcatgctcctgtagtcccagctactcaggaagctaaggtgagaggattgtttgagccaggagtctgaggttgcagttgagctacgatagcccatggcacttcagcctgggcaacagagtgagaccctgtcttggaaaaaaaacaaaaaacaaaaaacctcactcaaagttggtgtagtcagagaaatagctcaatattatagctaccaatatttataatgacttaataaaaatcaataattgaaagtagacttgtaattgtacacttctatatgtttatacagtttaccaaaaacctctgcattattgctaagaacaaaataaaggatgggtatcaggtacctttctaatatgaaattcaagaattttcaaacatcaagcccaatactgaaaggccttatggtactgagatcttaccacgaaggaggcacaactactgttcagactagagttgcagaggtagttagaaagtctataacctaacatggtgtcaagctaggtcaaaacacagtgtatataaacgagcagtaaaaaacagaatataattataaaagccaatctacaatatggataccaaggtttttccagggacagtatgaggaaaatatgttctctgattacaattattataagatagtatttaatgcagacaacagtacttaatgtgtaactacataaactgaacatacaagcaatcagtttattgttgtaatggaaactaaatcagatatttatgtataacatacaatataggtagtctaccataaacggtatttgacaaaaatgactggagattggaatcttagcatagctttccattcaattctccctttttagtcctctcatacacagcaagcatccataagtgttccctgatactctgtaataacgagtaccatgcagctatagtgcaaagacaaaattattggacacaacgaaactaaacttggattgtcttggatggtaatcattctcttccctttatactctatgttcttttagcctactagtctaatcctctatcttccttccccttgacccccaaggcttcagtgaatagggttcactgttaaccttcttgtcaggtgtccaagacgcttgtcaatttaaggcaataaaaactgttattcaaagactttggaaagcttgaacatcacccatgaaagaggatggaaaatcagaccaggaaaaaaagacaagatgaggacatcacgaacataggttctggatctctgcaaagaatgaattttgagcaacagaaaagggtccgtggtaaggaggcatgaataggaggggggaatgaggatgaagaggaaggtaattactcttttgcctcagtacttttaaagctttacaatcaaggcaattgtactttcagcaccactcttagcaacaaaatggcttctaatcaaagagacactgtccccttccctctaaaataaacattttccctatttctaaaatactgaaaacgtcttcatcaaaaattagctaaaagtctctaaaacaaggccgggcacggaggctcaagcctgtaatcccagcagtttgggaggccgaggtgggcggatcactggggggttaggagttccagaccagcctggccaacatggcaaaaccttgtctctaacaaaaatacaaaaataagccaggctttgtggtgcgcgcctgtaatcccagctactgtggaggctgaggcaggagaatcgtttgaacccgggaggcggaggttgcagtgagccaagattgcgccacttcactccagcctgggcaacagagtgagactctgtctcaataaaaagtgcccaggcatggtggctcacacctataatcccagaactctgggaggctgaggcgggcagatcacaaggtcaggagtttgagaccagcctggccaacatggtgaaaccccatttctaactaaagatacaaaaaaaattagctgggtgtggtggtgcacgcttgtaatcccagctactcaggaggctgaggcaggagaatcacttgaacccagaaggcggaggttgcgatgagccaagatcatgccactgcactacagcctgggtgacagggcgcaactccatctcaaaaataataatgataattaataaatcaatgtaatagatgtatttcagatttctttcactcaaatagaatgctttaacagaggaaaggggtacaaatactggatatgtaaaggaatggaagaactttctcttggatatagaaaggaaaagtagtaatagagtcaagatactaagcttgaggacttcagaggttttttttgttttgttttgagatggagtctcgttctgtcgccaggctggagtgcagtggcatgatcttgactctctgcaacctccatcttccaggttcaagcaattctcctgcctcagcctgctgaattgctgggactacaggtgcacaccaccatgcccagctaatttttgcatttttagtatgggtttcaccatgttggccaggttggtctcaaactcctgacctcaagtgatctgcctgccttggcctcccaaagtgctgggattagaggcatgagccaccacgcccagttgtggacttcagagttttgatggagatgggccatccctcctaatacctatgatagaaacgtcaaacttctttcacactgcaagaccctttttgataagccccaaaataaccttccactctcatctcctgctgtaatcccccatgtatcgacacataaaactacaagagcccatgctcacaaatgtaaggaggccaagtcctttcacaccttgccctatacttttcacataaactctttttgtcctttaaggcccagttctaccagttcaaataggtttttctttgcccccttagaatattctaaattggttgctttcccttttgcccccaaagcatacaattcacacttcagttgtctgtacagttgcatatgccaaaaatcatggagtcttccttgactcctcccctccttcaatcatactccaaattaatccattagcaaatcctgttgatttcaacctttaaaacaggtccaaaacatgaccaccttccaaaacgtccactgctacccttctggtgcaagtcaccatcatctctcacctgggttactttaacggcctatctgatctccctgcacctttatgccctgaacggtttatatgccacacaacagccagactgttccttttaactttaaataggactatatcgttcctctgctcaaaaccttccaaaggcttccccatctcactaagagtaaaaagtcaaaattcttacaaggggctataaatgtcctatataatctgtgatgaccgctccagcccaaatgatctctctgactaatacagtttggatgtttgtcccctccaaatctcatgttgaaatgtaacccccaatgttggaggtggggcctggtgggaggtgtgtgggtcactctgggtgtgtgctctcatgaatggcttggtgatgtcctcgacagtgaatgagttctcttgagatctggttgtttcaaaatgtgtggcacctcgccactgactcttgttcccactctcgccatgtgagacactgctccctcttcaccttctgccatgatggtaagcgtcctgaggccaacaccagaagcagatggtggcactatgcttcttgtacagcctgcagaactgtgagccaattaaacctcttttctttataaattacccagcctcaggtctttatagcagtacaaaaatggcctaatacactgacctaagccttacactccccttcctgtttatacaccactccagggacccgtcctacatattccagatttagagcctttgcattttgtcttcatctgttctttctctcaaccctttcaaatggcttactcctgcacatctttcagatctctcctccaatgtcaccttctcagtgaaatctttcccagtgactctatccaatatttcaacaccctcatctccccttctgtacttttccctcaccatcttccatactatatgtattctactcgttgcttactgtctctccccacaagaatgcaaactccatataagcagggtttttgttgctgttgcagttttggtcatcattgaatcaccagcacccagcacagtgtctgtcccatgacacatcctcaagaaatacggaatgaatatttacctatccaaatactaaacagattataaactgtttaaaggcaggcccaatgccttttaaaactctgtactctctcccctctctcaagaaacagtatttgatacataattcatgcccaatacatgttgaattaaccaaccatttacctgtatcctagcataaaaaagcagaatatgtacatagaaagctattttctgtatggctgacagtaagtgtacattagcggcaagcagtgatgaaaagatgcctcatctctgtttccatattaacagacaaattgtttgttgttattctttcttttaaggcaaatgactgagccaaacatattttagagaggtaactttttcattataaggcaggacacaacatgagacataaaatataactggcaggaagaaaaacacaacaaaccataatggtgtgtgacagtcttactgatctcatttacaggtacaaaagcagtaatttcacaatgagattcatctattctagaaatattttccaaattctactcttgtaactagtgataaactcagtactgttcattgcatagaaagatgaaagacttttctttcttttttttattagagatggggttgccctacgttgcccaggctggtcccaaaactcctgggctgccttggcctctcaaagtgcttggattacaggcatgagtaccatgcccagccagaaagatgaaagactaatttaggtaacaagtgctaatgctacagagtttcatcaaataaaattttgggggaattttactgccctagaggactggttctagccactttcccagggcagtggatctctgcaaagtttcagttattggaaaaatcttgaagtctataagcacatcaagcattgatgtttgacccattataattatgttaaaactatatagattatgtataaatacattttaaaaaattttaacgtattactggcctcagagtagttctgccattttcccaatcaatggatattagaatatacaacctctatgccatgtgagggactacagaattaactgatattaaaaaggaatcctcactgggcgtgcctatgatcccagtactttgacaggccgaggcgagcagatcactttaggacaggagttcaagaccagctggaccaacatggtgaaaccttgtttctaccaaaaatacaaaaaaaaataagccaggcatggtggtgcatacctgtagttgcagctactcagagaggctgaggtgggagaatggtttaagcccaggaggcagaggttgcagtgagcagagatcacaccactgcactccagcctgggcaacagagcgagactctgtctcaaaaaaataaaaaacaaacaaacaaacaaacaaacaaacaaaaaaacaaaataaaaaaaccaagccaggcatggcggcagatggctgtagtccctgctactctggaggctgaggtggaaggatcacttgagcccaggagttggaggctgcagtgagctatgattacaccacagcataggtagatgacaaagggagactctgtctccgcacccccaccccaccaaaaagtaaattaaaaaaggaatccttatatttcaaaaagagtgagaataactgacctagagctttcaaaggtaccattcattccacatataatctttcactttcagagagaaaattactacatagataaataggcattttttccacaccggtactcgcatctaattggcagtatggcaaaggaggaaaggaaagacttgggtttgggtcttgactgtcctataaactaggtattaaaacgtgaacaaggcacttcacttctacaagtttcaatttcttcacatataaaatgaggatgaatctacctcccctaaccacttcattaaaagatgttagaaaacaaaatcagaatggaagttaaattatgaagtactatatagaaatattaccatacagaatgcatgcaggtgcagaaaaagttaagtttggatgtgactatacagggacttgaatgccaggctaaaaacttgattccataggaaataaacattaagaggttttactgtcagggggtgaggaattctggggatggtggagtgagacagagtgtgtgtgtggtgggggggtggagtggggtgtgggagtgtgtgtgtggggggggggggatgtgtgtgcatgtccatgtgtgtggtatgtaaccagtgagataactgtgccttcaaacaaatctattggcaccgtgaaaggatgtaggaattcaaagaactaaaggctactgtaatggttcaaataaaagataaaaacctggactaggccaggcatggtggctcacacatgtaatcccagcactttgggaggccaaggaggtgggctgatcgcttgagcccaggagctcgagactagtctgggcaacatggcaagaccccatctctacaaaaaatataaaaattagctgggtgtgccatcagatggccaaatcattatttactggaccagaccttttcaaaactatcaagcagatagtcaaggcctgtaaagtgtgccaaagaaataatcccctgcactgcaggccatacatttcaatccctctatctttaacctccttgttaagtttgtctcttccagaattgaagctgtaaaactacaaatcgttcttcaaatggagccccagacagtccatgactaaaatctaccacagacccctggaccggcctgctagcccatgctccaatgttaatgacattgaaggcacccctcctgaggaaatctcaactgcacaacccctactacgtcccaattcagcgggaagcagttagagtggttgtcggccaacctccccaacagcacttgggttttcctgttgagagggggcactgagagacaggactagctggatttcctaggccgacaaagaatccctaagcctagctgggaaggtgaccgcttccacctttaaacacagggcttgcaacttagctcacacctgaccaatcagatagtaaagagagctcactaaaatgctaattaggcaaaaacaggaggtaaagaaatagccaatcatctgttgcctgagagcacagagggagggacaacgatcaggaaataaacccagacattcgagctggcaacagcaaccccctttgggtcccctccctttgtatgggagctctgttttcactctattaaatcttgcaactgcaaaaaaaaaaaaaaaaaaaaaaaaaaaaaaaattagctgggtgtggtggcatgcacctgtagtcccagctgcttcggaggctgatatggtaggatcacttgagcccaggtggcagcagttgcagtgagccaagattgcaccactgcactccaacctgggtgacaaagcgagacgctgtctcaaaaaaaacaaaacaaaaacaaacaaacaaaaaaccagactacagcactgacattaagaaaagaatgggctacctttcaaatgtaggagggaggagtgtggaaaagagaaaaactgagcacaaaaatagacaggtggacagtaacccaggataaagaaaaacaaaatgttctttgttattggaaagatcaagtttagttgtgttaaatttgagatgtctggaggtactcaagtatttcaacaagggtgtgaaattaagccttaaaaaaagaagtgttcccagagctgtagatctgggagttagctgcttaaggtgactgaaggtgaaagaagagtgagaagagtaacacagtgctgaataaagaacctggataacaccaatgttagaagaacagacaaataaaatcagggaaggaggataaaatgaatttgaaataggacaatagggagaatttattacaaatgctgtaacttacagaaatattaaagaagaaattcaacataatgtttaagtttgatatttgatttagaattaaatattaaggaaagagtttagagaacacatttttgacttggtttcatgcttacagaaatattattttcctctggtgaaaaatctgtaagctcccagagtaagccttcccccaatatctccctagtcaaaagcttttgaattggtgtgaaatattcttccttcccataccatcattgaacttagttgaaggtagacaaataggctgatgatgaaaacagactgagatcctgttgtctccacacatttacagtcagaaatgatgctggccagccagaaagcaacaaaagtgatgacaatcttctggagagaagatgtttgttctttttattatagtctacaaatgcttattgtagacatctagaggtcacaatagcacataccctttcactttaacttttatgaaaatgataaaaataagtcctaaaagtcttggtagttttctgctcatatgaaaattttagaacttaaggagtcagtatccatttaaatctatgctttaaaacaattatctctttacttatagcatgatacaataactgactttatctcttctcttacataactaagaaaagattaagctgtgtttggtatattgtttaaagtgacaatgaaatatgattttcctccaaatagtacatttcagcacccaacaagcaaaattttcagtatctgggaaatatttcaggtatttggttgtattttccagaatagctcatttgctagcaatactagagagagctggcatcatgtcttaccattttagccaacggatctcacaagcctcaaattttaaaaatgaagtgctttgttataattctctgaagaataagtaattatagtaactcatttacttatcttaccaagccagaaacctggaagtcatcctagagtcttcctttctctaacctgattaatcatttactatagttaaatagctctcaaaaaacatttctctaccaccattatcccttgtctaagtattaagctattaactaaactcactgggcatcaaattataataatcagactttgtgctgatgtttagatatttaacatctgatgatgtactctgcccttcctgtactaaaaggctgcaaggacagcatgtcaatgcaaaatcatagtactccttccaacagagaacttttctcttcaccatgtgattctaccatctgacctaggagaagtgcctccagttattccaaaatgtcaacttctccgatggcctagagcagtggtccccaatctttttgacacaagggaccggtgtgatggaagacaatttttccatggatggggttggggattggatgatggttttgggatggaactgttccatctcagatcatcaggcattagattctcataaagagcgtgctatctagatccctcacatgtgcagttcacaataaggctcgtactcctatgagaatctaatgccatcgctgatctgacaggaggcagagctcaggcagtaatgctgctcacctcctgtgtggcccgactcctaacaggccatggaccagtactagtccacagcatgggggttggggacccctggcctagaggcctggttagatttctattcccttttctgttagcatttatggataagcaacaaatgaaacaattttagaagcaaaatgcagtaaagccctaatcccaataaagtgtaatgttcatatcttgattatatgacaaataagataatgaaataacaaatccatctacatacgtataactgatttatatgtttttactgagtcaaacatctctggcatttagctatctaaaaatacaaaaaaaaaaatttaaagcaaggcaattacctgaggagagtcaaaaggatatcgactactaaatttaaatagaagttgaaatttttccccttcatataaggtacctggtgcaccttccatgtctacaatccacctagaatagaaaaggcaaattaaaaacttaagataatagagactggggtaaggaggagaaaagaggacaccaagtacttcctatacactaagcactaggacaagagttggttatgtgtaacagcacatgccagcctcccaataactctcttactgttaattctcatgacctatccccttctctgacactcagcggtgaaataaccagatcaaggtcagacagctagcaaaagacagagccaggtctaaaaaagcaaactaaataaaacccaaggccgggtgtggtggctcacacctgtaatcccagaactttgggaggccaagacaggcagatcacgaggtcaggagtttaagaccagcctgaccaacatggtgaaaccggtctctactaaaaatacaaaaattagccgggcatggtggtgtgcacctgtaatcccagctactcaggaggctgaggcaggagaatcgcttgaacccgggaggcagaggttgcagtgagccaagatcatgccactgcactccagcctgggctacagggcaagactgtctcaaaataaacaaacaaacagacctcaaactaaggtgcactgacaccaaagcctgtgctcctcctaattgatttatactaccttattttttcaaagtaccatttctacaatgctgatattacgtattctatacataacatcaaacaaagcaactgcctctgattattactggtggaagccatggagaaatacgtatagacaatgaccacagagaaccgtagctgtcagacttatttttttcatcaacatcctagagaagattaacagggcaaggggagctaaattgacatcagtccacttactctgatgattaagcaaggctttgtggtgactttcctttatctctcactatgtttcaattgtttaataaagcccatttctatgccatctatgcaagcctttgttttcatatataacaatcataaacataaatgtgttatttacagtttatatactattcttgttattttctttaagatgggaagaataagggataatgacagcaaagataacagggcagcattagaagcaaaagtgaattgaagtcattaacaatgtgttcctaattatagctctgtcacttataattcttgtacacctgggcaattctcttgaacttttcagttattaaactttcttgtatttaaaatacaagaaaacaaaaggaagatagaaaatacagtgttgggattctagtcatcaccacgcatactatgaaccttggattatgtaaaataataaatgtacctattctctaaaagaaatcagctacagtatacagactcttaagagcatggctattcattttaagaatgcacgctgagtaccatacatggtaataaaagatacgaccacagacccaagagacaatattttatagtgaaattagacagttataactgaagttatactgaagtcgcagttatagttaatcttaactcattgtgtgaacaagttatgttatctctccagttttaactacctcaataataaaacagaagataatcacctcatagtgttgttggaaagataaatgaccctacatacgtaaaaaacctagcacattcctgactcagtcaatacatggtaaattaaatgcaatgcaaaagctgcatacaaaacaaaaaactatctctttatatattaggtccttcttaatcttcgaaattcctttcttatttttccacccacatccactaggcacagtgatattcccaggaaaaacggtggtctttcattctgtttatatggtaattttaggacacataacataaattaacatgtaacctatacaaacaagcacagcttttaaaaataaagagctaagcaagtatctcatcaatccttgtaatatctgcatgacatgcagatactgacacgaggtcaaaggcagcataactttcaacatggtgcgtggtactttcttttttttttggtacagagttttgctcttgttgcccaggctggagtgcaatggcgtgatctcggctcaccgcaacctccgcctcctgggttcaagtgattctcctgcctcagcctcccaagtagctgggattacaggcatgagccaccacacccggctaattttttgtatttttgtagagagggtgtttctccatgtttttcaggctggtctcgaactcccgaactcgggtgatctgcccgcctcggcgtcccaaagtgctgggattacaggtgtgaaccaccgcacctggcctgtgcatggtactttctaataatccttttgttttgagacagggtctcactctgtcacccaggctggagtaccgtggtgcaatcagggctcactgcagccttgacctcctgggctcaagtgactcccccacctcagactcccaagtagctgggaccacaggtgcacaccaccatgcccagccaacttttaatttttttctttttttcagtagagatgggatctccctatgttgcccagtccggtcttgaactcctgggctcaagggatcctcctgccccgcctcagcctctcaaagcattgagattacaggcatgagccaccatgccaggactaataagtttgtattagttaaaaaagttaagatatgttcattgtagaaacttcagaaaagtataaacaaaaatcacccagtgataaccactgttaaagtttttgggggtatatttcattctagtcattttgctgtttcctataccatcgaagcctatatgaaatggcagcccagtagctgcattttgtgcacacttaaattacatcaatttaaaccatcagggtttatgattccaatcacaagcatatgccccagagtaaggatgcaatgagactacacgtgttgttctctcaattagtctcagttctttaacacccgtgagtacctagtactctgtaattctaatgtttaagcattagaattttttttatttcttcacatatcatggttcttaatcaaagacacaaccatctattccactctggaggaaaaactggctttggtggatttattaaaagaggatacataccagtaaggtcttcctaaaggatttttcaaaggtaattataactatacaaaatttttaccttacatgctgactacagactataattcaagtgatgccatttcactgcactgccttgacaaaccttttccatattattgacatttacactattcccaaattatccctagaattagcaatgtcgaaatgagtatagttagttctaagtctttttctagatctgttactttcctaggatggtgtatggtaggtcaaacatgatagtattcatattttttaaggtctcaatatatgctaccaaatttcttccagaaaattaaaaaaattgtttttgtgggtacaaagtaggtgtatatatctttggggcacatgagatattttgatacaagcacacaatgcataataatcacaccagggtaaatggggtatccatcacctcaagcagttatcctttctgttacaatccaattatacttttagttatgtgaaaatgcacaataaattattgttgactatagtcaccctgttgtgctctcaaatactagatcttcttcattctattttttgtacccatcagaaagcttcttaatgtgctttcatcatcctcgttatggatcttccacatccatatccacatttcatatactcttaacaatctgattctttataagactattttatagcctagaagatggcacaaaggtaaaaattttatggttcatttacaataaattattttaaaagaaaaattcttgcctgaccaatatctcgatataataggatttactctacaacaaaggtattgttgctttggctgttataatttgtggtataactacctggtaatctattaaaatgtttctatttgtaaaaatttaaaacagtcctttaactttttataaattattgtgttgtgtggtttccccatcctcccaaaaaaataaacgatgaaagaagaagtaatctcattattatcactttccttgagaactatagggacagctgttacaggatactctgaggtaggttaagaaaaggagagaggaaaaagattaaaatgggatataatctgcatcaggatgaaaaaagagtcagtttcatttgtttaataatatgcaacaaatgccactctaaatgtatgctccatttttggttgttttagaacaagagtttaatattttctatgtatgatatatacaaaaaatcagtttagaactcaacaatatttttaagtgattgttacagagttaaagatgtgtattacatttttttttttttccaaaagagtctatacatccattcgtaatatgcttgttcttaaagctttgacccctgtcttaggtactgatacaaatgccaaagtcaaaggtacccaaaactgtttcctctgaaagggtaagttatatgaattttggtcactttcactccctggacctagactacactaaatatttgaattggctcatttgtcctacaagttggtttacaatcaatttttatcttattggccacttttccttttctttttagaggttttttttaagtggaggataaattattttagatttctccatgatttcagaacatttaccactgtctaataaaattattaaatgactgctgagagtcacactttcactttgttgcccttctgtacaggacgcaattgatgtttttagggcatgggataccttttgactattactctcttcatatgcctaaatagatacatatttttaatttgataaaacctcacaccaaacagttctttaatattatagatgagaatcacttcataaacaaagtcagtgctactcagttaaacaaaattttttaaaaatgtaccaaagatagtttaaaaacagctttacaaattatgcaacaatgtttataatgccgtaaaacaaaattgattatatatataaatgcacagaataagatctgtttactctatttacctcttggtgaaagaatgaaatgtgaaaataattttgtagttttaaaaagcgggtgaacattcatacattattggtaataaaacaaagagcccttttaaaattaaatacttactgtgtaattgaattttgaacactcttctcatttaaggtcattccaggaggtgggtcattttgcaaagccaacagttctttctgtagtcgtttctagaaaagaacatcaataataatttgtcctttttgagactaggtctgggtcacccaggttggagtacagtggtgtgatcacagctcaccacatcctcaaactcctgggctcaaggaatcctcccacctcagcctcccaagtagcttgagactacaggcacacaccacaatgcccagctaattttttttttggtagagatggggttctcactttgttgctcaggctggtagtgaactcctggcctcaagcaattctcccaacctcagcttcccaaagtgctgagattacaagtgtgagctaccacactcagcctgcacttttaaaaaaacaacataacatctttccagttatccttgataatatccttctacaatctgaaatcattaaatttcctccaaatgttcatacctttctctttactagccccttatatattctatatacatattgctcaaaatttgaatagcctgtcctataattcacaatctattgtcaaactatttcaacactagagcttccaggcagctgaatgtatggagtttcctggagggtggcacatctggaacggaacatggaaactccacatcccttccctcatgtacttcttcatctgtatgcattataatattctttcctataaaccagtaaatacatctatggcagtaatagtagttctggcagcagccaccagagcctcaagagcacagccaaatgggtggctttcctggagaatctgctggaagacctagaaggcatgaaaagattaaggaaattttttaaaaagatattcaatgaagaaaatattttgttttggctagcatgtaaagatttctttttttaatgcaagataagcagatgcaagaaaaggcaaaggaggtctacatgacctttctttccagtaaggcctcgccacaagtcaaaaagaatatattttcactcaacaaaagatcttttcactcaacaaaaagatcctggaagaaccacatcctctgatgttccaggaactccaggactggattttcaatctcacgaagtacaacagctacagtagctgcttaaagtttgactaggtttgttgttgtttattttttaagagacagggcctcactctgtcactccagcaggcatgcagtggcacaatcctagctcactgcagcctggaacttctgggctccagccgtccttctgcctgagtctcctgagtagctaggactacaggtgttcaacaccatgcttggctaattaaaaaaaaaaattttttttttgtagagacagggtctcactatgttgcacaggctggtcttaaactcctggcctcaagtgctccttccaccctgctttctcaaaggattacaggtgtgcgccactgtgccagccctgatttgcttttaaaatacaagcaaactgcaaaagaagagaaagttcaacctgatgctcaaactacagctagaaaagcttctagaatttttaacacgagttcccaaagactggcagatttatgaaggaaagaaagtaggctacgtgtggtggctcatgaatacaatctcagcgctttgggagggagagacggggaaaatgcttgagcccagcagtttgagaccagcttgggtaacatagtgagaccctgtctctacaaaaacaaacaaacaaaaaaaataaataaatatatatatatatattagccaggtgtaggggcatgcacctgtactcccaggtacttcagaggataaggtaggaggatcttttgagcccaggaggccaaggctgcagtgaactatagttgtaccactgcactccagcctaagttacagagtgagattctgtctcaaaaataaaacaaaaattagaaaaatcataacaaaaagaagcaaataaactttcagggtttctaattgccttgttatgtacaaaaactgaatgggatatgtgtattctcttcaatgggatacgtgtattttattaactgcttgaccagtaagttttgcataatggctaatcttacattaaaaaaatagctttgaagtttcggttcacaaaacgaatcgatttcttccacactggaaaaaatatttcaacactgatgctgtaaagcagttatgacgaataggcagttacctatacaacatcaagacatcatagctactatattgaggttgtaggtcgagtagccattatctgaactgcttgtgaccagaactgtttcggatttactggttgagcatcccaaatctaaaaagccagaatctgaaatgctccaatgaacattacctttgagtgtcatgttgctacttaaaatgtttcagattttggagcatttcacatttcagattggggatgctcaacctgcgtaaggtcttaacagcttgagttaaaagtgcttaaaagttttagcagtgcttcctttgctgctttctaattataaaacccatagttcggctgggcgttgtggctcacgcctgtaatcccagcactttgggaggccaaggcgggaggatcgcaatgtcaagagttcgagaccagcctggccgatatggtgaaaccctactaaaaatactaaaaaaattagccaggcgtggtggcgcgtgcctgtagtcccagctactcaacaggcagaggcagaagaatcgcttgaacccgggaggcagaggttgcagtgagctgagactgcgccactgcactacagcctgggcgacagagtgagactccacctcaaaaaaaaaaaaaaaaaaaaaaaagccatagttctccataatccttaaagaatgtcatttcacagacaagctttccagagaaactctaaaagtaaccctttatgcaaaaagcctttcaaaaattttatgccttgtgacgagaatgaaataagaaaaaagaaaagaaaatattaataaaattttaaatgattttatatgtataatttttaaaaaattttaaagtaattttaatatataatgatcacctgcacagtttaatatttcaaggttattgttaatgaacatcgtttatagtagaacatcagaatacaacatattatgatctgagatatgttaaggttttcttcctacatattaggtatcctaaaatggctacgtattttgcacgcttatttgtacagcttttattgtacacctcttcccttgttatcatcagtggacatactttttcagtgtacaaccaggcaaaaacaaaacaaaacaaaacaaaacacagtagtccctaatttatgaattttaaaaccaaataactaatgttattaaaattgcatgcaagattataaagggtcttaatatgacttttttttcagagacagggtctcgctatgttgcccaagctggagtacacaggtgcaatcccactactgattggcatgggagttttgacctgctctgtttctgacctggatcgttcacccctcctcctgagacaacctggtggtccctcgctcccgagaggtcaccatattgatgccgaactcaatgtggacacccaatcgacatagtgcatgacagcccagaactcctgccgcagctttccaaatagctgggacaacaggcacctacactacacccagcgtaagtcttttcttaaagtgaagaagacaagtatggatatctgttcatttcttaagagtactctgcttaaaaattggtttctgttttttctggacaatgaaatattactatcagtaagtaatgtttctacgtcttttcaatttatgtcacttaaaataagcttagccatccaacaccactacagatagaaaactgtgttgtgaatcactgtaatggactttaaatttgcttaaataatttgttttgaataaagacaaatttatgcaaatttctgtttgaacaaggttttaattattttctactgatattcacaaatgagggttctgtgatcacgtacatttttttaaaaactgggtcaaacaaagaactggcttcttcaacagaactttccatatactaacttgtacagtcattgtccaaaggcaagatgacataaagaggtttccaaaaatagctgagcacagtgatgcatgcctgtagtcccagctactcagggggctgaggcaggagaattgtttgagtctagaagttggagtccagcctgggcaacacagcaagaacttgtctctaataacattaaacaaggccaggcacagtggctcaagcctgtaattccagcactttgggaggtcaaggagcatgtaatgcctgaggtcaggagttcaagactagcctgggcaacatggcgaaacctcgtctctactacaaatacaaaaattagctaggagtggtggcatgcgcctgtaatcccagctactcgggaggctgaggcacaagaatagcttgaactcgggaggcggaggttgcagtgagcctagatcacgcgaatgcactgcagcctgggctatagagtgagactccatctcaataaaataaaataaacaaaaaactcccaacaacaacaaaaaagaggtttccaaagataatagaaccctttgtagagcgtctcaagccttgtttcaaggaccatattttgggaaacactgctgcagaaatcttccagatcttgagaactttactaagtcaagaaggataatccttcttagtaggagaagcaagaatataaaggagaatcaatctgcataactaccaagcgaaacacaagacaacaaaagcaaactaaactaaaaaagcgctttattggtatatcatccctggtctcctgaacataatggaaaagggttctatagaaaaaaaaaaaaaagtttctccttacccttagacttctttcatctccacaaaggaagggacctatgatagccaactttcaagataattcccaacaaactctaaaggtcctagtattcacacccttgtgtagttccctccctcagagctgatctgtgtgaccaatggaatacagcagaaatggtgtgtcactcccaagattagattattttaaaaactatggtttctgtggccgggtgcgatggctcatgcctgtaatcccagtactttgggaggccgaggtgggtgaatcacctgaggtcaggaattcgggaccagcctgactaatatggtgaaaacctgtctctactaaaaatacaaaaaatcagctgggcgtggtggcatgcgtctgtaatctcggctactcgggaggctgagacaggagaattgcttgtacccgggaggcagaggttgcagtgagtgagatcaagctgctgcactccagcctgggcgagagagcgagactttgcctcaaaaaacaacaaaacaaaacaaaacactatggtttctgtcttggtaattctctctctcaaatcacttgctctggaggaatcaagctatcatgttgagaacagcctaattcagaggccttcatagtgaggaactgaaacctcctaccaataaccatgtgatgatttgtaggcaaatccttcaattcaaatcaagctttcagatgactactatcttagccagtaccttacctgcaaactcaagagggaccctaagccagaatcaaacaactatgcctctgattcctgaccctcggaactgtgaaataacatttgttgttttaaatcgctaagtttaagggtttgttacgcactgatagataatacaggaccactgctccatcctcccctccatcccagaagggactgtcatctacttcctcatcaatatcactaagtcacaatctaagacattcactggaccatgcttttttactgagggggtggaattattacattaaaaaaagacaattcatgccagcccccagccttcttagctactaggcaataaactgccttgcatattcacatcccctgaaatagtgagagagaagggccagcatttggggggttaaatgagtacatactacattcacaaataaaacattttttaaaaagatacaaacagtgaaaggtcaagcaatgtgtagtatctgttctgcagattcacaaaaacagaattcacccttagttgcattcttcccagaacaacagttcattagacagggcaggaaaaatcctgaagtcgtgattctaaaaaactagttctaagtttcccaaatgtagacatggaagagctgaaagaaaatgatttaaagagctgcatgtaaagataaatgaaaattcacattttgtttgtaaatatgaagaactagtatgaccttttagaggtcacacaatccagaaagctataatcacatgaggctgcattcacctataaatgaagacaaagtattaacaaatttgttaagaaacactagtatttaggacagaacacttgctaaaggtatgacaccactggcttataaaaccatcatggccatactggcctgctttcccaagtggtagggaaaatggcagctacagattgagataactacaaaatggaaaataactgcagaatgttaagtactgtaagtaaagcagcagaaacacccagaaaccatgggggaaaagggagaagaggacatgagaaattaggttccagtggttcatagccaaatattacccttgtctgtcccaaaattggtgaggtatgggaaaattaaccacaaatatactactctcctctgaatctaagacacgccatcaattgtaagatgcatcatcattttatgtgtcactaggaaagaaaaactgctgccaattaaacaatgacacaccttcaataacacatatcctgatttgaaagatgttaaaatatggaaaaagtgcatttaaaaaaatgaagtgggtcgggtgcggtggctcatgcctgtaatcccagcactctgggaggccgaggcaggtgcatcacctgaggtcaggagttcgagatcagcctggccaacatagtgaaaccctgtctctactaaaaacataaaaattagccaggcgtggtggtaagtgtctgtaatcccagctactcaggaggctgaggcaggagaaatgtttgaacccagaaggcggaggttccagtgagccaagatcgtgccactgcactcaagcttgggcaacagagtgagactcttgtcttaaaaaaaaaaaaattatgaagtggtattaaagagtttaattttcctaagtctactgaaaaataaaacttcgagtatgtttctgagttaactttttaaaattgatttaaaaatatatactttgtagagacaggttttagctgtgctgcctggcctggtctcaagtgatcctcccaccccagcctcccaaagtgctaggattacaggcgcaagccattgcacccccagccctgagtaaatttaataactgattcttatcttggtatttaacacctaccccaaaacacatgacttcagcaaatctttaaatatgcactttattcccagaatttgcataggagtgcacagacatctatcctccccagggcgaaaaggcctaaagttatttgcaaaagaatctcattccagaagaggctgtttccttttttttattcttccatccaaaaaagccagtcaggtccagaatgtaaatgttttgaagcatctcaaatctggagaaaacctgaaaactctagcccttaccttgtgttggttcaagtctgcaaagcacccaagaatctgagctcttctaagatacccaaggtttacaaattcagtaagaaggattctgatacatctaaataccaataatggtatgtaaatgattacatactttcagaactggctcggcttttcagtgattttatagtccagctagcagccagctccctttctctccttcctcatcataaaaataaatgatatgaaaccacactaatttattcctttttttccccccggtaagaaaaccattgacaaattccataattaactattgtcaatgtattgggacataccacaaaacggaatgccagatctgtatgtcataataccttggttgaaaatctctactctagatcactacaacagcctgcgatatgcgaccctaaacttaagagtgacaccagcccaggcacagtggcttacacctgtaatcccagcactttaggaggccaaggcaggagaattacttaagcccaggaattcgagaccagcctgcacaacaaagtgagaccacgtctctagggaaagaaaaagagatgacacgggttcagttcctaaaacttttttctgcttgaatgcatgtgaaggattattcctgaaatttactctcccctatgactgggagttactacaggggttgaggtgtaaatttaagttaacatcaaaaggatgctcaagagattaatatacccacttctccctattttgcactgtcacctctccaagaatcactgtaaaggttgcttcacatcaaaggtcaatcagatgtttgcacaggactgtaacctttgtaacatcacttcagcctctgattgactgctttctgcaactaatcagactgattgtgggccaccacttcatttacatgaagtgaacaccaagtggccaatgggaaacctctagggggtatttggacccaagaagattctgtatctggggcccttgagcggctgctctggccactccaaccctgtggagtgtactttcattttcaataaagctctgcttttgttgtttcattctttccttgctttgtgcattttgtccaattctttcttcaaaatgccaagaacctggacaccctccaccggtaacaaatgcccatatttacatattagtttaagtttgctatttcagagagctgcgatgataggtacatcagtactgaaaaagcactactacttggttcttcagtagggaacattactgtttagaatgaatactactacatcaaatgaaatgatcctggttattttgaatcatggaagacatttttttaaaatgctcctagttaaaaaaaaaaaaaaaaaaaagtattttggcacattggctcacacctgtaatcccagcactttgagatgccaaggtgggtgaatcatttgaggtcaggagtttgagaccaacctgaccaacatggtgaaaccccatctctactaaacaaaattacaaaaaatcagccgggcatggtggcacatgcctgtaatttctgctactcgggaggctgaggcaggagaatctcttgaacccaggaggcagagtttgcagtgagccgagatcacgccactgcactccagcctgggcgacagcacaagactccatctcaaaaaaaaacacaaaaaacccacaagtattcaaaatagcatcctaaaaagctcattcatttcttttttggttttttttttttttttttttgaaacagaatcttgctctgccacccaggctggatggagtacagtggtgcaatctctgctcactcagcctctacttcccgggctcaagcgattctcatgcctcagcctcccgagtaggtgggactccaggcatgcatcaccacacctggctaaattttgtattttaaacatggtgagatggggtttcaccatgttggccaagctggtctcgaactcctggcctccagtgatccacctgccttggcctcccaaagcactgggattacaggtgttgagccaccgtgcctggccaaaagctcattcatttttcttttcttttttttccccccaagaaggagtcttgctctgtcgcccaggctggagtgcagtggtgcgatctcggctcactgcaaactctgcctccaaggttcacaccattctcctgcctcagcctcctgagtagctgggactacaggtgcctgccactacacctggctaattttttgtatttttagtagagacagggtttcaccatgttagccgggatggtctctatctcctgacctcgtgatccgcctgccttggcctcccaaagggctgggattacaagcatgagacaccacatccagccaaagctcattcatttctaaattagtctggcttctaagctaattcatttctgaaagtattatcccacattaacacattttgaaaattaaagcacaaaaaattcaaatgatactcttgtggttatgaatcaaaactggaagaacagaatatatccttctgagatgctaataatggcaaaatatcaaccaagaaattgataaaattccttactttgtaaaaaacttactttccagtgagggaagagatagtcaataaataaaaacaaagcaagtaagtatccagttgttcttctgtatcctcaggagcttgattccagccctgccccttttgcataccaaaatccacatatcccaggggctgaacccgcatacaggtaagtcaactctccgatactcaggtataaaatgctggcaattggaggaaaaaaatctacatagaaatggacacacagagttcaaactcgtgttgtttcaaggctctactgtactatatgatatattaaaatatgaagaaaaataaagcaaattaaggggatgggggaggtatagaggtctcacattttgtaaagttttatctcaacttgacattttgagaaactatcctaaagggtagaaatcctcattcagggaagttaaaagtacaaacaagagaagaaaaaacattaaaaaatgtgggaatatataatggttgctaatacaactgtatataaaatgaccaagaatgttttctccaatttcatctaacaaccaactaaagatggaaagttaaaaataggagggtatgatggaaaaaacagaaacaccattcacattaatattaatagcactgcactaataagtagatattatttttccctaacaacattaagaaacagaattctaacagtggccacttctcctttcagagggaaatgtgaggcaatgtattaaatttactattttttttttaaaacagaactaaactcaggctgagtaaggaagcattttccctcctactgaattctgatgacatttctaacagttacttattaaaactgttttccctttcaggaaagagaatgcaatgtaggtattcattcttagtttaagctaaactttttaaaattctgacaaatgaaaaagtgtcaagacttaatgatttctgctcttaagagcccacagcccacaaaaggagacaaatgtgccaataatttctccatgctttcagagtacagtagtgtccaaaagaagagtggtaagaggagaaaaaccaggactgtggtatgcacaaagccaaggaagaatatgtttcaaggactaaccagactttcttttccagcacaatggcagagtatataccccggataattacagagaaaacaaagacaaagtgaacgcaggaactctgaaatgtaaggattaggactggattttgccgtggagatttcaaacaaatccaatagcaaaaccaaagtgaagatgctaacagaggagctacctgaaactatgatccctcagtgtaaaggtgaacaagaaaatgggcaaagagacaacaatgaaatttgcctactttaaactgaaaaaaattctcccctgaaatttcataacctcaacccacatggattcatagcctgaattcctgctacctgagaacattaagcaaggatttaataaaaagtagtccaggaagtggtggcctcaaagcaaccagcagaaacgaacacaaatataaatcctggagaaatccaagttctgtcctttgaggcaacaatttcactgctcagaatcgtagaaagatacatataaaatagcttcactgtaaacaaaatctagaaatatatatccatcaataggtaaattatacaaattatagcatagcaaactaagactatgcaaccgttaagaatgacgtggggccgggcacagtggctcacacctgtaattccagcactctgggaggccgaggcgggtggattacgaggtcaggagattgagaccatcctggcttaacatggtgaaaccctgtctcgactaaaaatacaaaaaatgagccgggcgtggtggcgggcgcctgtagtcccagctattcgggaggctgaggcaggagaatggtgtgaacccgggaggtggagcttgcagtgagccgagatggtgccactgcactccagcctgggcgacagagggagactccgtctcaaaaaaaaaaaaaaaaaaaaaaaaaaaaaaatgacgtggacgtgagtactgacaaaaaaaataataaagaactccaaaacctactgaaataaagaaaaagcaagcctcaaaaatacatgtaatttgttaaaataaaagaggtgtaattacacaacatataaatgcacacaaaggaccaaaaacacattcaattattttgtacttggaaatggcagtggagaaagaggacatactgtttgcactacatgcctttatattatttggctgttttacaaaaatgtagaagtgtattttttgtataattaaaaaataactcaatggatgatgaaaacacattcacacaaaaacatatatacaaacattcatagcagcattattcataatgccaaaaaacaacccaaatgcccactaactgaagaatgaacaaaatgtgacaaccatgcaatggaattttatttcgccttcaaaaagaatgaagtactgactcattttacaacacaaatgaaccttgaaaacattatgatgtttttgaatgaagccagtcacaaaagaccacatattgtatgatatcactgatatgaaatgtctataacagtcaaatctgtagagatggaaggtaagctggtgattgccaggggctggggaaaggagaatggagagtgactacttatggacacaaaggttgctttttgggcatgataaagatgttctaaagtcagattaagggtatggttgcacaacagagtaaataaatttaaattatcgagtgtagaaatgggactattttatgacatgtaaattacatctaaataaaaattttttcaccgagcacaatggcttgtgcctgtaatccaaacactttgggaggccaaggcaggaagattacttgcagccaggtgtataataccaacctgggccacacagcgagaccacatctctacaaaaaaataaaaaatttgcccggcatggtggtggtatgcacctgtagtcctagctactccggaaactgagggggaaagatttcttgagcccaggagttcaggttatagtgagttatgatctagccactgcactccagcctgagtgacagagagagaccctgtctctttaaaagaaaaaagaaaacctcaatgagtaaagaaactaaacacaggtgaagaaagaatttctacttaggaagatggcctgaagaaattacccaggatataactcagagaaacagataatgaaaatatgaaaggtagagacaccaaaaaaaaaaaaaaaaaaattagagaacagaaagcaacattttctataaatgtttcttaaataataatgtgtggtggtgcacacctgtggtcccatctactcgagaggctgaggcaaggaaattgcttgaacccgtgagacggaggttgcagtgagtcaagactgcgcaactgcacttcagcctggcaacagagcaagactccatctcaaaaaaaataatagtaacaacaataataatgcctgagaatctcccagaattgttaaagacatcagccttcaggtcaatgaagcccaattaattctaagcagcataaacaagaaatccaaacttaaacatcactgtgaaagcataaaacaccaattaaaaagagctaattcccctccccctccccctctgcacggactccctctgatgccaagccaaggctggactgtactgccgccatctcaactcactgcaacctccctgcctgattctcctgcctcagcctgccagtgcctgggattgcaggcgcgcgccgccacacctgactggttttcgtatcttttggtggagacagggtttcgccgtgttggctgggctggtctccagctcctgaccgtgagtgatctgccagcctcggcctcccgaggtgccgggattgcagacagagtctcactcactcagtgctcaatgttgccctggctggattgcagtggcatgatctcggctcactacaacctctacctcccagccgtctgccttggcctcccaaagtgccgagattgcagcctctgcccggccgccaccccgtctaggaagtgaggagcgtctctgcctggccgcccatcgtctgggatgtgaggagcccctctgcccggccgcccagtctgggaagtcacaagcgcctcttcccggccgtcatctcgtctaggaagtgaggagcgtctctgcccagccgcccatcgtctgggatgtggggagcacctctgccccgccgccccatctgagatgtgaagagagcctctgcctggccgcgaccccgtctgggaactgaggagtgtctctgcaccgccgccaccccgtctgggaggtgcggagcgtctccgacgggccaccccgtctgagaagtgaggagcccctccgcccggcagccgcccggtctgggaagtgaggagcccctccgcctggcagccgccccgtctgggaagcgaggagcgtctccgccctgcagccgccccgtccaggaggtggggggcagcccccgcccggccagccaccccatccgggaggtggccagcccccgcccggccagctgcaccatctgggaggtggggggcagcccccgcctggccgccgccccgtctgggaggtggtgggcgcctctgcccggccgccctgtctgtgaagtgaggagcccctctgcctggccaccaccctgtctgggaggtgtacccaacagctcattgagaacgggccatgatgacgatggcggttttgtcgaacagaaaaggaggaaatgtggagaaaagaaagatcagattgatactgtgtctgtgtagaaagtagtagacataggagactccattttgttccgtactaagagaaattcttctgccttgggatgctgttaatctataaccttacccccaaccccgtgctctctgaaacatgtgctgtgtccactaagggttaaatggattaagggcagtgcaagatgtgctttgttaaacagatgcttgaaggcagcatactcgttaagagtcatcaccactccctaatctcaagtacccagggacacaaacattgcggaaggcggcagggccctctgcctaggaaaaccagagacctttgttcacatgtttatctgctgaccttccctccactattgtcctatgaccctgccaaatccccctctccgagaaacacccaagaatgatcaataaatactaaaaaaatttaaaaaaaaaaagctaattctaatgccatacacaaaagatagattagctacaaagttatagaaattagaaggctaccattttaagaacaatgatgtcagcactagaaatcagtaaaaatatattttatgtaagtaaaaccaccaatttaaactcctataccaagcaaaactaagtttaaaaaaaaatggatgaaataaagatatgtgcagacaaaagttttactaccaacagtaaccaacaaaagattaaaccctgaattccttctggaaaatgatcccaagggacagatctgagatgaaagaatggtgggcagatacttaaagtgtgtacatctaaacaatgaataaaacaatacaggcccacagttccttacgaaacagctcttggatgggcacagtggctcacacctataatcccagcactttgggaggctgaggcgggtagatcacctgaggtcaggagttcgagaccagcaggaccaacatgaccaacatggtgaaacctcacctctactaaaaatacaaaattagccaggtgttgtgactgatgtctgtagtcccagctactcaggaggctgaggcaggagaattgcttgaacctgggaggcagaggtcgcagtgagtcaatattgcaccactgcactccagcctaggcaacaagagcgaaactccatctcaaaaagaaaaagaaaaagaaaaaactctttggggcagatgtttcagacttaaaaattttttagatttaaaaaaattttttataaagcagcacaccaccaaacacattagtaatcagcactaaaatatgtgaatacttaaaatatacaggatttttaggaatactgcaatctaatgccccaaggtcacaggctttgccaccaggaaagtttgtgaccaacttacaaaaaaaatttttggtttttagatcttttttaaattttggatgggataagaatatgagcacaaaatgtctaatttgtaaaataaaacaagacagaacgaaattacaaggcattcaacacataaatttggaagcaggtgatggggagttaaagcattttaaggtcgtagtgtttaagaagagtgcaaacatgcagataaactttagattataataagtatgttaaattagctaccataatggctacaaatcattaacataaaaaactaactgggccaggtgcagtggctcaagcctgtaatcccagaactttgggaggccgaggcgggtggatcacgaagtctcaggagattgagaccataccggctaacaaaaccccatttctactaaaaatacaaaaaattagctgggcgtggtggcacgcacctgtaatcccagctacttgggaggctgaggcaggagaattgctcgaaccagggaagcagaggttgcagtgagccaagattgcgccaccgcattccagcctgggcgacagagtgagactctgtctcaaaaaacaactaaccaaacagaaaaataagcaaaagtctagaattcgtaattcacaaaaacaccataatggctaataaaaacaggaaaagaaacgcaacctcactggttatcagataaatgcaaattaaagccacactacaataagtaatggttaacactcaacaaactggtaagaccagcttggtaggtatgtacgggaactgaagttctcatacatggctggtagaagtataaactggtaaacaattttataaaactacttgcttttttttgtaaacttggatatagaaatatgctctcacccaccaattccattccaaggtatacccagcatatacgttcaacaaaacacaggtacaaggaggatgtttgtagcagcattatatgtgaccaggcccaaacaagaaaaaactcaaatgtccatcatcaacggtaaaacgggtatattgcggccgggtgctgtggctcacacctgtaatcccagcactttgggaggccaaggcaggtggatcacccgaggtcaggagttcaagaccagcctggccaacgtggtgaaatcccatctctactaaaaatacaaaaattagccgggcatggtggcaggcacctgtaatcccagctactcgggaggctgaggcaggagaattgcttgaacccaggaggtagaggttgccatgagccaagattgtgccattgaactccagcctaggcaacaagagtgaaactctgtctcaaaaaaaaaataaaaacagccgggcaccatggctcatgcctgtaatcccagcactttgggaggctgaggcgggtggatcacctgaggtcgggagtttgagaccagcctgaccaatacagagaaaccccatctctactaaaaatacacaattagctgggtgtcgtggcgcatgcctgtaatcccagatactcgggaggctgaggcaagagaatcgcttgaacccgggaggccaaggttgcagtgagccaagatcgtgccattgcgctccagcctgggaaaaactgtgtctcaaaataaataagtaaataaataaataaataaataattggtaaattgtatattcatacatggcaataaaagtgaattacaacacagatcatagatctcacaaattaatgtgagcaaatgaagtcagacagaaaaataaatatacagtataatttcatttatgtaaagctcacaaacaggcaaaagcaatctatagtattagaatcagaatgtaagctgggcatggtggctcatgcctgtaatcccagaactctgggtggctgaggtgggaggatcgctttccaggagtttgaaactagcctgggcaacacagggagaccatgtttctacaaataataaaaaaaattagccaggtatgctggtgtgtgcctgtggtctcaattactcagcagacaggagactaaggtgggaggaacacctgagcctaggaattggaggctgccgtgagccgtgatctcaccactgcacaccaacaggggtgacagagtgagatcctatctcaaaagaaaaacaaaaaagaaatcaggatgtgattacctttaggagagggaggaagtagtgcttaggaacggacataagggaggcttccaaggtggagctaccattttattttttcatgtatggtgattacaaaggtgtattcactttgtgaatatatgaactttacatgtagatttgtgcattttcctgtttgttgtatttcagtaaaaacatgtatcaaactgatctaaaattgactggtgatagttgcataactccacgaatatattaaaagtcattttaaatggatgagtatattatgtgagttggttcacaataaagctgtcaacaaaagcaaaaaaaagtttattaaacaaaaaaagaaaaagcaaatatggaaaatgttaattgttgaatctacacaaaagctacagaggtgttaacactgtttctttctacttttctgcatgcttgagatttttcgtaaaagttttcaataaaaaataacagtaaaataagtgcaaaaaaacagctacagtaacatctaaaaaatattgtaggccaggagcggtggctcactcatgtaatcccagcactgtgggaggccaacgcaggtggatcacctgaggtcaggagttcaagaccagcctggccaacgttgtaaaaccccgtctctactaaaaatacaaaaatcagctgggcatggtggcgggtgcctgtaatcccagctactttggaggctgagacaggataatagcttgaacagcggaggtggagattgtagtgagccaagatcgcgccactgcactccagcctgggcaacaagagtgaaactccatctcaaaaaaaaaaaaaaaaaaaaaaaaaaaaattgtgtgtaacttccaaactagtagaggtatgaaaaatagaataagaaaactgaaaaagaactcaatccaaaataaggaaagacacagacataggaagaaaagacaaatgaaaagtacttaaaaggaaagaaataaatcctattatattactcattaaaaatttgactaacttctttagtaaacagtaaagaatattagattggttaaaaagtatagttatttgagtttttttaaaagatattactaaaatgttaagagtacagaatggttcagagtcaaaggatagaaaaaagatactaggataagttttaagaaacaaagctggcattgctatgttaatatcaagtgaaacaaatgttaaggccaaaaataataaaagatagaataactatataatgatatagtcaccatgagcataaaacctgtatacacttagtaacaacctcaaaatagataagcaaaggacaatctacaagtctatcttcatagaagattttagtaacacctctcaaagtaatgaacagctcaagcagaccaaaaagcaaacaaaaggataaccgaattgagaaagtcaaaagttaagaatagacatttaatagaagagccacaaatgccccaaaacacatacaattatactcaattattcttattagctaaggaaatataatagaaccataaggagtatctttcaccaaaataagtccagtgttggggagaatgtggtatacctggaactcatgtactatcagtaagagcataaactgatgtaatcactttggaacaggatggcattatctagtaaaacggaacagacatgccataacctagcacttgcatttgtaggtcaataccctaagagaaaaccatgaaaatgtgttacaacatttaaaccagcactgttcataacatgttaggagtaaaactgatcaaatgtgatagtttataccatgaaataccacttacttagctttaaaaatatactgctacaaagatggattaatcttgaaatgataaaagtcagaaagaattactaacagtatgagtccatttacctaaagtttaaaaacaaacaaaatatattgtttaaagtaaatataaggaaaaataaaggattacaaacataaaatccaagacagcaatttactgtgggaaggaaatagtgaggtacaatcagcaggacattaaaaaaaaaaaaaaaaaaaaaaaaacaggacacagaaggggcttcaaaggtaatggcaacttttattccttaagcaatgtgaatattttataaatattctttaaaatattcacctatgatttctatttttatatttttatttaactttttttgagacagggtctcactctgttgcccaggctggagtacagtggcgcaatctcggcttaatgcaacctctgcttcctgggctcaggtaatcttcccacctcagcctcccaagtagctggaaacacaggcatgcaccaccacaccctgctaatttttgtagagataggattgcgccatgttgcccaggctggtcttgaactcctgggctcaagtgatccttccacctcagcctcccaaagtgctgaaattttaggtgtaagacaccatgcccagcgtcacctatgatttttaaattcttctgtatgcatgtttcattatctttttttttttttgacactcttaaatttgattgtgaagggaaagaaagcaacagggtggtagcagaactgaggcagaggcaggtgtttgttaggagaaacttctgcatatgtaaatattgaagagacgggtaaaggctagagaaaggtggtgataaatgaaattgtaaaatatctgagaaagaagagatcagctagatgcggagtacagaattagagactttacaagggattgtgttttcaatgggtgttactactctacacaggaaaaaatatacatttttaaaaattaaaatcaccccttaatctcaccatgcagtgatctccttgggacagtgatttttctttccatgaatctgtattttctaatatttggcaataaacatatgtaaagtatttttaaataaaaatatgatcatgctgacaacaatgtggcatatgtactggagaagttaagactgaaggcaggaaagacaggctgaaaactactagaaaaaaattacatttgagacattactaatgaacaactggaggaatcaaaggacttacttaggatgcagaatgaactagatttggtgacaagtggatgtgcaaagtgagaaagagaagaaatgaggctgaccccagagtattagtctggatcaatgacaggaagaagctaggcatggtggcttcttggcctataatcccaagtacttgagaggctgaggcaggagttcaagacaagtctgggcaacacagtaagacccagtctctcttttttttttttttaaaaaaaaaaaaaaaggaaagagaaggtggaggaagggaagacaaaaatgaagggggaaggaaaaaggagggatggggagaaagaagaaaggagagggaggggagaggaaagaggagcaatacagatagctggtctgtttatgaagggttggaggcaactgagattaagattagttttggacctgaccagttcaagttccctgtgaacattgagattgacagaacaaaacaacggaaccagccagaaatgaacaatgactattccctttaaatagagctgccctctttagggtgggtatgctgtctaccatgaatccaatgtatgtacatgtaccttaaacctgcttggctccaagaggcaaagagtttactaccctagaatcaaattttaatttctcaagctagttcagaagttatctgtctagtattcaggaaatgaacactccaaatgaaatatttgttttctgaaaaccttgactcagaatgaaataaaatacagttctgtatctttctctcattgatccctgcatttcatgccatagatgaaaagcagtaattagcactaagcctgacagagttaatgtttcatttaagccaaccatttttattttactttggaagaataaattttttttcttgtaaaaatacaattcaaatttttttaccttccaggtttcagcaggcttagctaccttcaaagattctgatatatataaattaagagttacataaatgtcataaagcatgtggtgaaaaatctacagccagggtctagcacaaagtattagatacgctgaataaaatgactgataacgccaccttcaaaaggtgggaagtttgacttgaccaacaaattgaactacaaatctcacgaaagaactatgtaaactatgtattagtatactagggtatgtcatgtcatgtatttcttcaaaatgtaagcaaaatgcaaactttaagactgtaagttaggtgctgtaagggatattctatggtctgaacatttatgtccctccaaaattcatatgctgaaatctaattcccaaagtattggaattaagaggtggagcctttgcgaggtaactagatcataagggtggaaaactggtgaatgggattagtgcctataagaaggcagagagctaatttgccttgctgccatgtgaagatacagtcagaaggtgccattctggactactgaatctgctggcaccctggatcttggacttcccagcctccagaactgtaaggattaaatttctgttgtttataattactcagtctaaggtactgaggtatagcagcctgaaaagaaagataaaatagttggttagatggattatttatttggcaaagtcttagttgcccaggatggaatacagtggtacaatcatagctccctgcaatgctcccgcctcagcctcccgagcaactgggctacaggtgcgtgccaccatgcccagctagtttattttttatagagacagggtcttgctatattgcccaggtttggaatttaactcctggccttaagcgatcctcctgcctcagcctcaaaatgcactgggattagagatgtgaaccattgcgcctgacccagcaaaatatatttaattggaaactcaatctctgatttgtaggagtgtataatacatgcaactttggataagtaacaatgtgtaccttagtatcttcataattaaatacctcagattgttattgaaagaacacaatgagatgggctggcagatacaactattttcaagcttaaagttccaaataaacatattaaagtagtattaatattcacagatgacaataaggaaaaaaataaaatgggaaataaaaagaaaagatgatcctaaaacagtttaccctaaccaactttcttgtaaagtaaataaagccagcatggtgggtcatgcctgtaatcccagcattttgggaggccaaggtgagaagatcgcttgagtctaggagttcaaggccatccagggcaacatagtaagacccccatctttacaaaaaataaaaaattagctgggcgtggtggtgcacgcttgtagtcccagctactcaggaggctgaggagggaggatcacttgagcctgagaggtcaaagctgtagtgaaccctgattgtgccactgcactccagcatgggtgacagcatgaaactccgtctcaaaaaagaaagaaagaaagaaagaaaaatattgattctatgacttagtaacaccattcttaaaaatttatactaaagaataccataaaattaggggaggcaatacaaatgcctaggagtaaaaaataaataaataaataaataaagtggaaacaacagtagatcatggcatattgttagaataaatattgatgctcaactctttaccaatcaaaaggcagcttccagagcttttaagttctatgacttaaaaagaaatctaggttagatctttccttctagtagatttagtctcaaaggaataaacatctggtgatttgtattataatgagcattactgttagaacattcttctaataaatctattttttagaaaagatgtactgcattgtcattgccatttttattgctgaggtcaatattttccagtgaacataaaatctagttttctaataaactcatctcagatggataaaattggtaccatagattctctgagaacatttttcttctgtcaagtaagtagtgttctctgaaaagtatgaattacaaatacagttaacccttgaataatttgagagttggggaaccaagccccaagcagtcgaaaacccacatgtaacttccgactcccccaaaacttagctactaataaacctgttgaccagaagccttctgttatttgtcagttacataaagtcaattaacatgttttgtatattatatactgcattcttacaataaagtgagctagagaaaataaaatgttaagaaaatcgtaaggaagagaaaatacatttacagcactgtgctgtatttatcaatacggtaaatttatgtcatctgtttataagatggaatcatctatctgaaatggtgggcaaccacaactgtaaatctacagtatgtatgaagcagttcaactttttctggcaatgtcatgactttcctctgcttctttggagtacttccagcatcactggtggcattttgtatggattccatagtgtttgattcaaagtttgcagtattgcactaaaacacaatgaaaaatacaccagaatagtgagagagcactttttactgtgatatgcaatttaaatgcgagacaaactgctcatgcagagggtcatacagcatgttaagtggatattcccaacacttgagctcacagcaatagcaacagaaggtgattatgaaatttgatgcagttatgatttgatacttcatctttatattctactttctttttttttttttttttttttttttgagacaaggtctcactctgtcacccatgctggagtgcagtggtgctatcttggctcactgcaacctccgcctcacgggttcaagcaattgtcctgcctcagcctcccaagtagctgggcttacagatgcacgccaccacacccagctaattttttttgtattttttggtagacatggagtttcaccatgttgaccaggctggtctcaaactcctgacctcaagtaatctgcccacctcggcctcccaaagtgctaggattacaggcgtgagccacagcacccagccctgtttacatttcttgactgtgaacagtgctgtatatggtctgtaagtgtgtaggtatgaaagttttgttaccttctggacccaattttttgttaataaaaaaatcatttaattattaattaaatcattacttattaaatgattcttaaagttccttttagtttaaaaatcccagaacctaggttattctactcattttcacaagttaaagctttattgagagtctttttacatattgttcagcctaattcaatcatgtatctgtaattacttttctatagttttatacatagtttatattctcattatgttttagtacttttctatattaccttcgtctaatgctattgttatttccatatatccatatccttaaacaactataatggtttaaaatgttccaaaaaaactaagtaataaatttggttttagtacaaactgtttcagtcaaccaaataaacaaattaccattttgataacaaatagattaaaactcatgtcatcattaccttgtatcttgtcctaagtaaatagattaccattttcaatttaacattgtaggaaacgctactcagtgtaaacaactcccccctccccactttctacctttaaacacccacttaaacatagacaaattatatacacttatgaattttttttttttttttttttttttgagatgggagccttgctctgtcacccaggctggagtgcagtagcacgatcttggctcactgcaacctccacctctcaggttcaagcaattctcctgcctcagcctccccagtagctgggattacaggcatgagccaccaggcctgactaatttttgtattttttgtagagacagggtctcgctggtctggctcgaactcctgacctcaagtgatctgcccgccctggcctcccaaaatgctgagattacaggcatgagccactgtgtctggccacacttatgcatttctaagcactctttacacagaagatttccatcagcaggaataaattttttttttttgagacagggtgttgctctattgtccagactggagtgcagtggtgtgatctcggctcactgcagcctccgcctcctgggttcaagccattcttgtgcctcagcctcccaagtagctgggactattggcatgtgccaccacacctggctaattttttgtatttttagtagaaagggggttttgctatgttggccagactggtctcaaactcctggtctcaagtgatccgcccaccttggcctcccaaagtgctgagattatagacgtgagccaccatgcccagcctaaaatcttaaaatgaaccgctaactttatggttccagggtagttactttgtcaagcccaaatacacacataataacaagacagtttgggaaactttttaattcaaggaagaaagtgatttgttttcttctttatcatgctcaggtatactatactgtgattttagggattttaccaatactttctcctgacatactaggtggaaacttgtatatgctggtcagagtcatcaacaagtaggaaaaaaaaaatcacatttaattcttacaggaagattttctaagctgaaaaatacagcaaaaatgtttaaaccctggcacttaaggtagatagcaaactaaagtatctcatacatagagaactgaccaaaataaaaataccaacttttttcactacaatagtttcaatgtatgtgttctaaaatataataatgtattataaaagattgcaagtatgtaagagtatgtaagatcagtattttgataaagagcaagttcaatcttctaagccttcttaaaaacaacttttgggccaggcgcagtggctcacacctgtaatcccagcactttgtgaggccgagatgggcagatcacaaggtcaggagttcgagaccagcctggccaatatagtgaaatcctgtcgctactaaaaatacaaaaattagccaggtatggtggcagacgcctgtagtcccagctactcaggaagctgaggcaggaaaactgcttgaacccgggaggtggaggttgcagtgagccgaaatcgcgccactgcactccagcctgggtgacagagtgagactccccgtcttaaaaaataatgataaataaaaataaaaataaaaaaaccttttgcttcaaagtttacataaacttgggcctcagttgccaaaagtagccatagaatgattctgagattttcagaatacctttaagcggctgggcatggtggctcacgtctgtaatctcaccactttggaaggctaaggcaggcggatcacctgaggtcaggtgattgagactagcatggccaacatagtgaaaccccatctctactaaaaatccaaaagttaggcaaggcatggtggctcacgcctgtaatcccagcactttgggaggccgaggtgggtggatcacctgaggtcaggggttcaagaccagcctggccaacatggtgaaacccagtctccaataaaaatacaaaaattagtcgggtgtggtggtgcacacctacagttccagctacttaggaggctgaggcaggagaactgcttgaacctgggaggcggaggctgcagtgagccgagattatgtcattgcactccagcctgggtgacagagcaagacttcatctcaaaaaaaaaaaaaaaaaaagaacataaaatatatttatgacaagtttcattctaagaaggaattaagaaatatgaaaagtacaaatactgacttataaaatcagttttgacatcctacgttgccaattcaagaaattatcagtttaactttcaatcattttcaattattaaaactacagcagctgaatttttaaaaattcagtatattaactgttgccagttcatgaagatttaaaataatttaaaaatatatttttaaaagaaaagtctgacttcagtcataagcagacaccaaaaaaaaagtcaatgttagaaaaagtgctaaaaaaaaaaaaaaaaaagcagcagctagtaccttttaacactatttttactatttaggatcatgggtagtcctttccaagccatcaccattaactgtcttaactttctgttacttgtacttattttcatcacgaacttgcaaggcttgcaaggactgaaccaaccttctctatcattaggggggtttttgcgtgcgtgtgtgtgtgtgtgtgtgtgtgtgtgtgttggtttttttgctttctttttggtgagtcttctaaactgagcaatttcttcaagcacagggggtttttgcgtgtgtgtgtgtgtgtgtgtgtgtgtgtgtgtgtgtgtggtggtttttttgctttctttttggtgagagtcttctaaactgagcaatttcttcaagcacagctgaccctcaacaacacaggtttgaactgcacaggtccacttatacatggattttcttctgcctttgtcactcctgagacagcaagaccaaaccctcctcttcctcttctcagtctataacaaggataaagatttttgtgactagctgggaatggtggctcacgcctgtaatcccagcactttgggaggctgaggcagggggaccacttgaagcccggagtttgagaccaccctggccaacatggtgaaacctcatctctactaaaaatacaaaaattagctgggcatggtggcgcgagcctgtaatcccagctactggggaggctgaagcaggagaatcacttgaacccaggaggtggaggctgcagtgagctgagattgcgccactgcactccagcctgggtgacagagtacttaatgaatagtaaatatattttcgctcatgattttcttaataacattttttctctatcttactttattgtaagaatagagtatataatacatatatcacacaaaatatgtgttaatcaactgtttatcttataggttaggtttccagttaacagtaagctattagtacttaagtttttgggaagtaaagttatatacggatttttgactgcacaggtggttggcttcctgttgttcaagggttaactgtaaattagaagaatctgaagtaaagctctgtcatcatgcaaaagctgtaactatgtttcagaaacgcaatctgtatttcatagacattaacagatgttctgtcctctgcaacatctaaaagaaccaaacacaaactccctataccaaaatactcccatctcccctaagcacacacagttctactctcagacacaccttaaaaataaaacatttggaaaaggaataccatttcagaaatgaggaaaagtatacaaagacacaacacatttgagtttggaaagaaagcagtcacataatcttaccatcaatgaagcaagacctaaaattacttgctaaattacttgctgtcagtaagggttacatacaggaagcttaagaaaaaatctactatggggggcagggggcgggggaagaaaagatactctcattgaagcattatctgcaaagtgaaagaattaccaaccaaatattaactgggctgaaagatgtgtatcattaacaggaagcttaccctgatttttaaatgctgtataaattttccttttcaacccaattctttactttctctaactgggacaaggcagaagcaaaagatagacagcaatggaatcagagataaggcaagaaggcaatatactcaactgtgttttcctatcacttctggcctattttgaaaacagtactatttatctttgttctatttattaacccagaaaacatctgagtgatgatgccagtaagcactgccctcattgagttaaaaatctaataaagacaaagtgtctttataatagctacaaggcagaagtgaaaaaccctacgaaagaggtaaaacatgatacggaggcacacaaggtactaaaaagtatgtacagctgtgaggatgaggctaaggttggtggatttatgatgtcaaagtattgagttacaaagaactaaagtggattttgagtaaaatttgaattcaggaagaaagttcaaagagtggaggggctaactaaatgatctgctaggtaagttttaaaaacaaacaaacaaaaaacctaggaacaacaaaaaaacaagacagggagctatcaaaacagcccaaaattcaaaatgaaagttcaggctagacatggtggctcatgcctgtaaccccagcacctcaggaggccaagggaggaggatcgcttgaggcagagtttgagaccaacctgggcaacattacaaaaaattttagaaattagctgagcatggtggcatgtacctgtagtcctagctacttggaagactgaggcagaaggatcctttgatcctagaagttcaaggttacagttaaggtacagttgtatcactgcattccatcctgggcaacagagtgaggtcctacttctaaaaaaataataaaaataaaatggaaattcaacataaaaagtcactaataatagttgctaaatactcctagcaagtaaaggatactgacagaatctccacatatgcagtaatatccataaggacaagagagatataagcccaggggccagcgtcaaacaacttgattctcaagaattttagtgaactgataagttcagcataggttgtagaatgagagatacaaggactagcaataataatgaccccaatgaagggcaaaaagacttaaaaacaagaatatcattccaagtacctagaaaggactattcttggtacggggccctgatatggtttgatacaggcccctaagattacttctgttgttattttttgtagagatggagtcctgccattgctcaggatggtctcaactcctggctccaagcaatcctcccaccttggcctcccaaagtgctgagatcccaggcatgagccatcgtgaccaacccagattacgttttaaatgagatttttatgcatattcaactccaacgattcatgatataataaaatatttttaaattttgtttaggtggactctaccagcattaaagaagaatcactgagctcataactgagcctatggaaccgccccatagccacatcttaatgtactcagttcactaaaactgctccacaaaaagctctcatgacagctattttgtttgttgtataaaatggccatcaaacaaaacattttactaaagctgataggacagtcaataagtgctcagatatgtacaggaaatgggtggtctttgacagaactataattatgtaggaacaaaacaaatatagatctttccaatctcgaatttgattcttaaatctttcaagaggattaaactttgaaatgtctcctgaactctaaaacaggtacaaggagatgtattacaacttacccaatttacataattggcacacctaaattcctgcattgtagtgaagacgagtctacaactttggctgcacattaaaattacctgaaggccaggtgcagtggctcatgcctgtaatcctagcactttgggaggccaagacgggcagatcatgtgaggtcaggatttgagaccagcctggccaacatggtgaaaccctgtctctattaaaaatacaaaaaatagttttaggtctaacgtttaaatctttaatccatcttgaattgatttttgtataaggtgtaaggaagggatccagtttcagctttctacatatggctagccagttttcccagcaccatttattaaatagggaatcctttccccatttcttgtttttctcaggttaaacgttagacctaaaaccataaaaaccctggaagaaaacctaggcattaccattcaggacataggcatgggcaaggacttcatgtccaaaacaccaaaagcaatggcaacaaaagacaaaattgacaaatgggatctaattaaactaaagagcttctgcacagcaaaagaaactaccatcagagtgaacaggcaacctacaaaatgggagaaaattttcgcaacctactcatctgacaaagggctaatatccagaatctacaatgaactcaaccaaatttacaagaaaaaaacaaacaaccccatcaaaaagtgggcgaaggacatgaacagacacttctcaaaagaagacatttatgcagccaaaaaacacatgaaaaaatgctcatcatcactggccatcagagaaatgcaaagcaaaaccacaatgagataccatctcacaccagttagaatggcaatcattaaaaagtcaggaaacaacaggtgctggagaggatgtggagaaataggaacacttttacattgttggtgggactgtaaactagttcaaccattgtggaagtcagtgtggcgattcctcagggatctagaactagaaataccatttgacccagccatcccattactgggtatatacccaaatgactataaatcatgctgctataaagacacatgcacacgtatgtttattgcggcattattcacaatagcaaagacgtggaaccaacccaaatgtccaacaatgatagactggattaagaaaacgtggcacatatacaccatggaatactatgcagccataaaaaatgatgagttcatgtcctttgtagggacatggatgaaattggaaatcatcattctcagtaaactatcgcaagaacaaaaaaccaaacaccgcatattctcactcataggtgggaattgaacaatgagatcacatggacacaggaaggggagtatcacactctggggactgtggtggggtggggggaggagggagggatagcattgggagatatacctaatgctagatgacgagttagtgggtgcagcgcaccagcatggcacatgtatacatatgtaactaacctgcacaatgtgcacatgtaccctaaaacttaaagtataataaaaaaaaaaaagaaaaaaaaatacaaaaaatagccaggcattgtggtgagtgcctgtaatcccagctacttgggaggctgaggcaaaagactcacttgaacctgagaggtggagggtgcagtgagccgagatcatgccagggcactccagcctgggtgacagagacatcatctcaaaaaaagaattagctgaagagctaagaaaaatgacaatacccaggatgcattccagagcaattaaatcataacgtggggatggtattttttttaaagtttcccaggtgatttcgatgtgatatcaaagttggaaaccactggtttgaactgcatggttaactcaaaaacaacaacaacaaaaaacaaaaaacaaaccaaaaaaaaaaaaggaggaaagtatgatctacagtagaaaatgagaaaatgaaagcagaatcaaacaagaaacctggatgtagcaacattaccttttactagttttaacaggacttcaatacttccaaatcaaaagtatactgaaacttaaatcaaaatacagctgggcagagtggctcacgcctgtaatcccagcactttgggaggctgagacaggcagattgcttgaggtcaggagttcaagaccagcgtggccaacatggcgaaacctcgtctctactaaaaatacaaaaattagccaggcatggtggcacatgactgtaatcccaactatttggaaggctaaggcacgagaatcacttgaacctgggaggttgcagaaagacaagatcatgccactgcaccgggtgacagagtgagactgtctctaaaaaaattttttttaattaaaatacagtcatttctcattattcacagtagttaagctctctacaaagttgtggcaaacactaaataagtaaatatggaatccatggttagaggaaatacagggttagattcctgccagcctctggtcacattattttcttcaaccaatcaaaagtaacttgtttgcatttgtctaaagactttctttttgagacagagtctcgctctatggcccaggatggagtgcaatggcatgatcttggctcactgcaacccaacctccacctcctgggttcaaacaattctcctgcctcagcctcccgagtagctgggattacaggtgcatgccaccatgtccagcaaatttttttggggggggggggcggggggggctgaggggatatttttagcagagatgaggtttcgtcatgttgaagctggtctcaaactcctgacaagtgatccacccaactcagcctcccaaagtgctgggattacacgaatgagccaccatgcctggcctcttatttactatatattgttgattaatatcaaactcacagccaaaagcactataacacatgcctgaacaaattttctccaaaaggcacagcacagccttcacgtatacaaaggaacactagacagcacataagttaaacagtgaaattaccaacaaaaagcacaaaaaagcgaaataatgtggcacaaaatagacctcaaaaagtcttgtttgacctcagctgggagtgtgtgcatagaatgacaaattcttcactgctctttaagtgtgcaaacgtcaaaaaaaaaaaaaaaaaaaaaaaaaaagcactgcgagtatcaattttagggttacaaacaaatgttacgaagacgtgaattcacaaatatggaactcatgaataatgaagccggaccatagaaacaatcaaggtaacctaaactaattgttataaagaaatgaattctatgtctgtaaccccagcactttgggaggctgaggcaggaggactgcttgagcccaagagttcaagaccagcctaggcaacatggcaaaactcatctctaccaaaaatacaaaaattagccaggtgtagtggtgtgcacctgtagtctcagttactcagcaggctgaggtgggagaatcgcttgggtccaggaggccaaggctgcagtgagccgtgacggcactactgcataccctagcctgggtgagagtgaaaccttgtctcaaaacgaacaaaaaatatgcccaacaaggtaattttctctactagaatccttaaattggttttcctaagaatgtaacaagttttcttttatcagatctctctatatatttttaaaacctattactcgatttccttaatatatatatgttcctttcatgtagtacaaaagactattctaattttaaaattttttaaattttatcttatggactatctctaatcataaaatgcagcaatatttaaagaaaaggcaaggtggttatactagacaacacctgagatgccctctggctcaaaggttttgtaagtctaaagactgaagttgataacgcctcttttaattacaataaaggcttataggtgaacacaaacatattctcagcagaccaggagcagtggctcatgcctgtaatcccaccactttggaaggccaaggcaggtggatcatgaggtcaagagatcaagaccatcctggccaacatggtgaaaccccgtctaaaaatacaaaaattagccgggtgtggcagcgcgtgcctgtaatcccagctattcgggaggctgaagcaggagaattgcttgaacccggggggtggaggttgcagtgacccaagattgtgccactgcactccagcctggtgacaaagcaagacttggtctaaaaaaaaaaaaaaaaaaaaaaatatatatatatatatatatatatatatactcagcaatattttatactacaatcacattttttagtagtaggactgcaatataaattcttatctgaggaacagctctccactcacccagagaagtaacctgaatccaacttgatactatcaaacctgatggactctcagcttggtcctatacaacttcaaatggaaaacaagctgccatattaatactatgaaactaaataatccctacattatatgcaaaaatgaattcaaaatgaatcaaagacccaaatgtaaaagccagaattattatatttttggaaaaaaacttagatgcaaatctccatcaccccctggattaggcaatgatttcttagatatgacaccaaataaacaaagaaaaaaacataaattttgccaaaattaatttttgtgcttcaaatgacactatcggaaaatgaaaacagcccacagaaaaaaagtaaattggctgggcgcggtggctcatgcctgtaatcccagcactttgggaggcagaggtgggcagatcacaaggtcaggaaatcgagaccaaaatcagctaggtgtggtggcaggcacctgtagtcccagctactcaagaggctgaggcaggagaatcgcttgaacccatgaggcagaggttgcagtgagccgagatcacgccaccgcactccagcctggcgacagagcgaggctccgtcccaaaaaaaaaaaaaagaggaaatttttgtgaatgtaataaataatgtctaataaaggacatgtagtctaaatatataaagaattcttataattcaacgaaatgacaaattgtttaggaccaggtgtggtggctcacgcctgtgatctcagcatgttgggaggctgcagtgggtggatcacttaaggccaggagttcgagaccagcctggccaatatggcaaaaccccatctctactaaaatataaaaactagggctgggtgcagtggctcacgcctgtaatcccagcactttgggagactgaggcggacggatcacaagctcaagagatagagactatcctggccaacacggtgaaaccccatctctactaaaaatacaaaaattagctgggcatggtggcacacgcctgtagtcccagctactcgggaggctgaagcaggagaatcgcttgaacctgggaggcagaagttgcagtgagccgagatcacgccactgcactccagtctggcaacagggcgagactctgtctcaaaaaaacaaaaaacaaaaaacaaaaaattagccaggcgtggtagcacgtgcctgtattcccagctactcaggaggctgaggcaggagaatcgcttgaacctgggaggtgaaggtttcagtgagccaagatcatgccacagccactccagcgtgagtgacggagtgaggctctgtctcagaaaaaaaaaaaaaaaaaattattgggcaaaaaatttgcatagatatttctccaccgaaataccaatatgcacaagaaaagacacttaatacatcattagccattagtgaaatgcaaaccaaaaccacaatgagatgccacttcacactaggatgctatcatcaaaaaaccaccataataaacactggccaaacatagaaactggagttcttgcacagtgctcacaggaatgcataatgctgcagttgctgtggaaaagtttggcaattccttagtgtggtattgcgatttacaacaagaaatatatatcttcatccagctcctaaaacccttggaatcttggaagttataaatatccttttatatgttaataccatgactggtggctgggggctcctggagagcctcagaagggagactggcagccaaaggaaccaaccatgtgattagagggtggaaacattcagccccaccccatcaatctttggggaagaagggggggctcagggttgaatggaacaccaatagccaatgatttaatcaatcatgcctaagtaatgaagccttgtaaaaacccgaaaggagagtttggagagcttttgaattggtgaataagaacatagccacataccccacggggccaaaggctcctgggttcatgacccttacaaacctcacatatgcatagcttcatctgtctgttcaattgtatcctttaaaatatcctttataatacattagcaattgtgagtatactgtcttccccggtttctgtgagctgatctagcaaattaatgaacccaagaagggggttgtgggaacctccaatttgtagccaagtcggacacaagtcgtgggtaacctgggaacctacaacttgtgactggtgtctaaagtgggggccagtcctgtgagactgagcccttaactctggttagtgccagaaatgaactgcagaacacccagctggtgttgaaaaattgcttggtgtgaaaaaaaaaaaaaaacccacatatctggtgtcagaaaaggagaatcaagtgttgtgggcgagtacataagaaaaatcattgttttttctctatagacttagaaagttaaaacacagagttactgtatgacccatttgttcaacatttactgaggtcctcctacatgcaaggtatattaacaaaaacaaattaaaacacaagcctacataaaaacttgtacatacatgttcacagcattattcatactaaaaaggggaaacaatccaaactgtcaattaatccattgatgaatgaaaacaggaaacacaaatatctgatatttaaataactggtgaatggataaactgcagtacaaccaaaaaatgggccattacttggctacgaaaaggaataagtattcatacaagctacaacatggatgaacctcagaaacattatgaactgggcatggtggctcaggccagtcatcgcaacactttgggaagcctaggcaggaggggtgctgagactgggagtttcaagatcagcctcggcaacacagtgaatctgtctatataaaagctttttttaaggccgggcacagtggctcatgcctgtaatcccagcactttgtgaggccgaggcgggcggatcacaaggtctaggagttcaagaccagcctggccaacatggttaaaccccgtctctacaaaaatacaaaaattagctgggcacagtggctcacacctgtaatcccagcactttaagaggccaagacaggtggatctcttgaggtcagaagtaagagaccagattggccaacatggtgaaaccccgtctctactaaaaatacaaaaattagctgggtgtggtggcgcacgcctgcagtcccagctactcgggaggctgaagcagaagaattgcttgaacctgggagacggaggttgcaatgagccgagatggtgccactgcactccagtctgggagactgagcaagactcttgtctcagggaaaaaaaaaactacaaaaattagctgggtatggtggtgcatgcctgtagtaccagctattacggaggctgaggcaggaggatcacttgaacccaggaggcagaggttgcagtgagcctattgtgccactgcactccagcctgggtgacaaaatgagaccctgtctcacctgtctcaaacaaacagctaagtgaaagaagccaggcacaaaaggtcatatataatataattccactctcacaaaatacccagaatagaccaatccagagacaaaaaatagatgagtggtttccagacactggggaaagggggaaatagggagtgactgctaatggataaggagtttctttctggggtgatgaaaatgttctgcaaacagcagtgatggttctgaacagattaaaaaccactgaactgtatactttaaaagggtaagttttatatgtggattatatttcaattagaagaaaaaattgtgcattaaaaggatgtcaaaatggactttaatagctcacaattttatttgactaattctcaagttttgaagaggattggcaaaaaaacacacacttactggaaaccatacttccaccctccttcctgtggtctgaaaatacaaagaaagacctcatgtaacacatggtcataaaggaaatctattttttccattgatagctagtgcagggactagaaatcagaaaaaaaaaaaagacaaaagcatctagtagagctagcttaaaatgggaaacatagcattaaaagataattcaccaattccaaagatccaggaaatgaaataacctgtttttatcatccctattttatatttggaggtgggaggttacacagctattaaacaacaacactagaattcaaacccaaggttatctgattccaaaagctgtgctcacttattcatttattcgacatttactgaactctcctacatgtcaggcactaggttacatccaagaaaatagaaaataagctaattaatacatagccaaaggtatgaagaatttatcaaggtaaaggaaattattagcgctgggatgggagagctattttatattgggtagtcaggaagggctctcttaaaaaaaaaatatttgaacaaagctatgagtgaaaagaaaaaaaaaaaaaaaaaaaggaagccatccagatcatccagatgtgtgagaagagcattccaaatagagaaaacaacaagcaggagtagcaaggaggacaataaggctacagagacatgagtacctgggagaggttaagacctcctaggctataacatggattttggattatattctgaggaagagagggaagtcatagtaggattatgaatgaaatgacatgacttttgtttagaaagaatctattgggaatctaaagagataagtaaacggatgagggcagaagtaggaaaaccagtatgacactgctaatataatccaggcaagaaatgaggatgtcatctgtatttacatcaggaattcagaaaatcagttgaattctggatatattttgaaagcagagcagatagaaatttgctaatggtttgactgtagggtggaatgaacccaaggtttctggctgagcaaatggaatgaagttgcctatataccaacatggggagtactacagaaaacaagtttgggtaagataaatacaaaatgcagttttatatgtttatctatctgctaatctgtttttgtctacccactacactccataatgatttctgtgcaatatagctttttaaaaagtagtgaaacaggacctgaatttgggtcttttcattacagagcctgtgttctttatctctaatgaagttttacaaaagcagctaaatgaaagtagagtattttcttagaataaaacaactcaaaagcatgcgctgttttttggtgatccaagaactacattcacaaataaaggctttcaaatgaggacactttaatacctgacaaacatgaacaagtattttgcagatactactcataatgaagcagacagcaataatataaagatggaataaaattcatctaacaaatgcttaatttaggtaaatactaaggagaactatattttcagagagatgccagatcatccctttattttttatttttatatatactttttgagacagggtctcactctgtcacccacgctggagtgcagcggcactttattttttatttttatataaattttttgagacagggtctcactctgtcacccatgctggagtagagtggcacaatcctggctcactgtagcctcgaactccctgagctcaggtgatcctcccacctcagccccccaagtagctgggaccacaggaatgtgctaccacacccagctaatttttgtcccacgctgggatcatcccaccttaaaaactctccttgataatgaagattatctttgaaggccaggcgcggtggccagccttgaaggataatctgatattactttctgctttagatttcctgcttcattaaggcaggaaaaaatactttccctctatcccttaaatgtgcacacagtgactaccgtaaatatttgtccattacttaacacttcaaaaagcattcctaaatagctaattctgcattagtttaattctattttaggtcagtctattaagcagttctacaatagtaaggttcagtacctataaaggaataatttaaaattcatatttatataatataccaaaaaagtggcttattttcttgctgcatgcgtttgccataactgtaatgttcttcatagtatcttcatattctttataaaaaaggaagtcaactaacctaatttcattctaatagagacatagcagtaactgctggtaagtatgtacttatttggaaagtgacttactcaaaattacacagtaactgagtagtgaaactaagctctgaaatctgttgatgctgtgaaggtgtaagtaatgaacacagtttggcatcacagagaaatcattggtgtaattatgtaacttttcagtcaagaattaagcatttactaaactactttatagtttttatagctaaagaaaagaagaaatattcctgagtttataacacaaggttactttatgtatcatattttaaaaagaagttctcatgtgtatacttgtgtactgagtaaaattataattgtaaatttttactgttcaaagataatcctttttttttttccttttttttttttttgttttagctggagtctcactctgtcgcccaggctggagtccagtggcatgatctccgctcactgcaaggcgcctccgcctcctgggcccaagggattctcctgcctcagcctctcaaataactgggattacagatgcgctctaccacgcctggctaattttttttgtatttttagtagagactaggtttcaccatgttggccgggctggtctcgatctcctgacctcaggtgatccactcacctcagcctcccaaagtgctgggattacaggcttgagccaccatgctggcctattttctaacttttaattatgttgtaacccttccatactgacatcaacaaacagacgtcgtatctaactgtcaaggcaacatgactactacaacagtaatgtctgtaagagtccatgttccatctctctcaatcactatagccaattacttgagcaaagagcagtgggctgggggcaatggctcatcctgtaataatcccagcactttaggaggccaaggtgggccgatggctgagtcctggagttcaaggccaacttgagcaacagggaaaaaacccatctctacaaaaaataaaaaaattagccaggcatggtggcgtgtctatagtcccagctgcttgggagtctgaagtgggaggatcacccgagcctgggaggacaagggtgcagtgagccaagaccacgtcactgcactctagcctgggtgacagagtgagaccctgtctcagagagaaaaaattttaaaagctgtgaataatccaaaataatgcattatttctaagtctgaaaataagcacacattcatactttatctcctgttattaaatctcaacctccttccatccctacaaattgacagttaacagtctaagacccagctaggtaagagaggaagtaaatgcagaaatttcacaagggtaattcaactgaccatttctctcaattatatcactgtttttagagttgacaaacatcaactactatgcactgactttctaagatcttaagacacaacgtaacaggaggttttatctaaaattaacaattctagaatgtcaaattagaaaattagacagcatatatgttaaaattgctaacttacgagaagtctgaatgaagcagttaaattctaaaatcagaaattatatccaggaggtcaagtacttcataacattaaataatacataggaaagaaaaaaggttataaaatttaaaaacacggccgggcgcggtggctgacgcctgtaatcccagcactttgggaggccgaggcgggcggatcacgaggtcaggagatggagaccatcctggctaacacagtgaaaccccgtctctactaaaaatacaaaaaataagccgggcgaggtggcaggcgcctgtagtcccagctacgcgggagactgaggcaggagaacggcatgaagcccggggattggagcctgcagtgagccgagatcgcaccactgcactccagcctgggcgacagcgagactctgtctcaaaaaaataaaataaaataaaattttaaaaaagcatttaacaacaacaacaaaaaattcaattttaggattcacctgagaaaagaatacctcaatactgctacactttcaaaaatgtttagaatcacataaaaattcacttcaataaaagaatgcttctgcagtttggggataaaagtttctaccaaataatcagtccctaaaacgctaaaactaaaaatttgctacaagaaacttttcatgtaatatttaaagatttttagaattaccaaaattaaatgtagatctgtttaactcctatcaattttaggtatcaccacaaatataacattctcttaatgatggtttcttaagactgggcacataggctcacgcctgtaatgccaggatttggggaggccaaggcaggtgactgcttgagcccaggagttccagaccagcctgggcaacatagtgaaacctgtctctacaaaatacaaaaacctgtagtcacagctactcaggaggctgagatggaaaagatcacttgagcccagggaggttgaaactgcagcaagccgagacagcgccactgcactccagcctgggtgacacagtgagaccctgtctccaaaaaagaaaaggtttcttaaaacataatttaactgtaatcttacttggtgatacattacttttttctaggaagaaacaataggaaggaaaagaaaaaaagaaaatgagtaaagaatgtctcaaagggatcacataagtctgaaaaccactatcttgaattgtatatggcagaactctagcaatattagggagtagagcgtccccagcatttacaggtgtgccagaatattgatctcccatcccgggagtttcatgaggtgctgcctgccaggtgcttctagcctcccaatctcatctactttagtgtactattcaaaacttactttctatgtgggcagaacctaaaagatggttgagacgcactgacagaatacattaaagcagttactagctcaactttaaaatacatactctccaataagaaattcaaagtctacccttacttgttttactcattaccaagtaatgaaatcccatgttacatttgtataatatggcattttaaaaaaaatacagttcctcttagagcttaagtaacttcagcagcagcagcaacatcctggtgtgggttagataaatctactaaaagctttttgggttaaggacatggtcattccatgttacagcttattttttcctaatcgaaatccccaaatgatcaatttcctagtcttcttccatgctttttctccactgcactatcaccttctaatataataacacacttggccgcgtgcagtggctcacacctgtaatcctagtactttgggaggccgaggcgagtggatcgcctgaggtcaggagttcaagaccagcctggccaacatggcaaaacccagtctccactaaaaacacaaaaaaaattacctgggcgtggtggccagcgcctgtaatcccagctactcaggagactgagtaggagaattgctagaaccctgggagcggaggttgcagtgagccaagatggcatcactgcactccagcctgagcaacacagcgagactccatctcaacacaaaaaacaagaacaaaacacaattaacttaaatatgctgttcttatctgtctcttcttatgagactatttattattaaatccatgagggcagaaatcttgtctgcttttgttcattgctataaccacagcaactagataagtgtctgacacatagaggtcccccaaaagataactggctcagtgaataaacaaagttgataattttattgaagatttatgtataatctagttgtcttaaaagagccaaatgttgccattaagatagtcaggatataaattctgtataacaaagatacagaataaccacacagaaagtagggttgtctttcaaaaagcttgacatatatattaaaatattcttaaagatactaccagcaaatctgcactagatattttaaaatacaaataaaaagggaaagacttttcaataaatataggaagcatccgttttccattcctctaaccagaaaacacagaagaatagagagtgataagatttcgatggaacaaggtgaaggaaaaacttaaaagggtggtaagagtctgagatagtaatacttagggcacagaaaaatgcactattgcactgtcaatcaagtatttgtttccaattcttaagacatcatgtaggccaggcacggtggctcacacctgtaatcccagcactttgggaggccaaggcaggcggatcacctgagttcgggagttcaagaccagcctgaccaacatgaagaaaccccgtctctactgaaatacaaaattagctgggcgtggtggttcatgcctgtaatcccagctactcaggaggctgaggtgggagaatcgcttgaactcgggaggtggaggctgcggtgagccaagatcgccccattgcactccagcctgggcaacaagagcgaaactccatctcaaaaaagaaaaaagacaccatgtaaagttcaagttcaagattaccaacctctctcttacaaacaaatctgccttttccagatactaaatctaacgagatgacacactacgttctcttgtcaaatacaagtgttgtggattttaatcttaatgtttagcctcaaataatgttttaatcttaatacagataataatcttaaacttgtcataaaaaatgttttaatcttaacacagataaaaatctttaagtggtaatgtagcctattgcatctactgttcaactagcattccactgttccttttttggcctcaaatgacgaaacttctccaacgtctctggggagactagtgtaaagtataatgtttcctgaaattgttcctgttttttccctgcaccattcgtgatatctcttcaactagaaatgttacataaaacttttctgttctgcaggcaagtccagagggagaagcaaggtaaagagaatattgtaaggaaaacaggttgaaaggggaataacataaaagcacaggagtaaatgtgaagcaaagctatatttgtacaaaagaggaagaagatgcagaaaagggaagaaaaacacttttagcagagtaaagaaaaaaaaatggaggaggaacagagacttgcttcttccagaaacaaaagcaaaaaacacttctaagaaaatgtggtctctttacccaaggggatattatgaaaacgctaaagggtactcagctgacactcctattgagcgttctactttctcttccaatgcctttgataccgctagtcttcacctgtgaattaaatgcaggctacagataacgcactcaatccctgcacaactacaattgtggttgccatctttgcctggaaacaaaaaacaaaaaaacccacaactccctagattcgggaaaaaggagtaaattaagttggaaagccagaaaaccacgccttgctaagtcggggggatatggcacaggttaacaaacgcctcctaccaaactaaggttccactaaaggtctgggaataagggcaaagagatgtatagccttatcgcgaccgcaagggtggggccttgcagtgggaaacaaaatagaaggcaagctatcccgagaggtttaagggggctgaggactcggctctcgggagatcgcccatcaggcggtggacacggggcagcttcgagaggaaggagacagtggactgctggaggaatgtccgcgagaataccgaggctgatggaaatagaagatacccacgggcacaggattaagagtcaaagggaagaagagagggacggggccgagcagtctggggggcccggcgtgggaggccggagcagaggccgctaagcgccgtccgcagccagccgccttctccggagacgcattctcggctcccgcacactcagccccccgccgcccctgccccggcaacaaccgcgggcgcagctgtttccgtcgggccagggacagcgggggtaaaggcaaccctggggctggcgggcagcagactggcagcgcccgtgtgtgtgtgcggggagccgattctgagaccgccaacgccagactttgccctttcttccccaaccctcctttatcacccaacttcccggccggctggtgtccgcttcgaccgacggataccgcaccccccacaacgcctctcgccgcctcttacccctcccccgacgccctgagctgagggaaaacaggccacccggaccgatcccgaacccgcccgggtgtccccgaatcgcggacgccacccccgcccgaacgctggcactctctcggcggctccctggcccgcccagatgcagcaaactcctctcacctgcattgacgccatgatggaaccatccccccaagaccggcgaggccagagacgc

SEQ ID NO: 93 - DNA, 92643 bp, Homo sapiens; identical to SEQ ID NO: 91
  source 1..92643: mol_type = genomic DNA

SEQ ID NO: 94 - DNA, 92643 bp, Homo sapiens; identical to SEQ ID NO: 91
  source 1..92643: mol_type = genomic DNA

SEQ ID NO: 95 - DNA, 92643 bp, Homo sapiens; identical to SEQ ID NO: 91
  source 1..92643: mol_type = genomic DNA

SEQ ID NO: 96 - DNA, 92643 bp, Homo sapiens; identical to SEQ ID NO: 91
  source 1..92643: mol_type = genomic DNA

SEQ ID NO: 97 - DNA, 13692 bp, Homo sapiens
  source 1..13692: mol_type = genomic DNA
ttattctaaacctttattgaaaggcaaatgcagaaagccttcaacacagaggatagatttagtgactgagggcccactggagtttaactaatagatctgctgactacgccgtacagtggaggaaacacgctgcaatctcaagacaatgcaggtaactcaatctgaaatccatcaaaaagaggacaacttgctcaggtacaaggcccctgaaaagtaactcatcaaatgacaataggaactgtgtggacactccctctgtaacatgcactaggatatcactctcctatattagaggagctccaagcagtgtatcatgctcaaatatttattaattgacagtgtccgacaacctcctgtccataaagcatggcagagtgggtaattaattggaaagagttggcagtagaactttaagaacaattataccttctacatcttaccactccccattcctagtgacaactttctcatctcggcgaattctcttgtgtactgtttctggaacatatattactaaattcctgtctcctttacaaaatgctgtatcttgggcaaaagacatatgtattgtgcttgtattgtgtatctaatgtgtacatatatgcatattctcacaaatatggtatacatttatattatgcatgtgtatggacatatatctgcatattgtaaaatgaaatagaattttttttttcttgagatggagtcacactctgttgcctaggctggagtgcaatggtgcaagcttggctcactgcaacctccggctcttgggctcaagcgattctcctgcctcagcctgccactcggcagggtgggattacaggtgctcaccaccaagcccggctaatttttgtatttttagtagagatggggtttcaccatggtggccaggctggtctcaaactcctgaccttaagtgatctgcccactttggcctcctacagtgatgggattacaggcttgagccaccatgcccggcctgaagtagaatttttttaaatgaacggtcggagatcgagctaaaggctataaaatggcagggttctaatcagctcagattgttttcagtagaaatgtacgcaaagtctttggagttaaatgatgaactgccacttatttatttatttatttgtttattttttgatatgtctcactcttttgcccaggctggagtgaagtggagtgatctttgcttactgtaacctctgcctccctggctccagcgatcctcctgcctcagcctcctgagtagctggaattataggcacccaccaccacatcttgctaattttggtatttttaatagagacaaggtttcaccatgttggccacgctggtctcgaactcctgaactcaggtgatccacctgccttggcctcccaaagtgctaggattacaggcttgagccaccacacccagcctaaactgccagtttacatcagttataatttttttttgtttttttgagacagggtctcactttgttgcccagactggagggcagtggcacaaccatggctcactgcagcttcaagtaatcttcccacctcagcctcccaggtagctaggactacaggtgcatgccaccacgcccagctaatttttcgtattttttgtagagatggggttttgtcatgttgcccaggctagtctcgaacttctgagctcaagtgatctacctgcctcggcttttcaaagtgctgggattacaggtatgagccaccatgcccagcctcagttacaactttttttttttttttgagatggagtttccctcttgttgcccaggctggagtacaatgttgcaatctcagctcactgcaacctccgccttccaggttcaagcaattctcctgtctcagtctcccaagcagctgggattacaggcatgtgccaccacgcccggctaattttttgtatttagtagagacacagcttgtttcaccatattggcccggctggtctcaaactcccgatctcaggtgatccacctgcctcggcctctcaaggtgctgggattataggcatgagccactgtgcctggcagttataactcttaaagcaacacaaggctcttggtagcctgattacaatgagaattaattaagtacactattttccacagtacactcccacgaagtttttagtgctgccataatgtttgtagtaaaaagaatcaacattttcaatttgttttttggggttttgtttgttttgttttgtttaggcaaggtcttgatctgtcacccaggctggagtgcagtggtgcaatcacaattcactgcagcttcaatttcctgggctcaagtcatcctcccatctcagcctcctgatagctgagactacaggcgtgcaatttaaaaaaaaattattttgtggagtctggacctcactacattgcctagaacggtctcaaactcctgggctcaagagatcctcctgctgcagcctcacaaagtgttgggatcacaggcgtaagccacttcacctggccttgattctttttaagctcaataaaaatggaactttgtcttgctgtcatggccagagttaaaatacagtcaaacaacaaagacctcatagagttaaagctcacaaaactgatacttaaaaataacttattaaataagtattgcaggcactacaacaggtctcaagatacagtggtgagcaagaaaaacaggatctcttgctttcatgaagttcaactagaaagtcctgtcgaatgatgagacatctttctttggggcagcaagttactttcacttagtggtaaaagggccaagaatagttcaggaacttctcatccacttgtctacccttctacacagacagcagcacagatctggctttttacatggccctaggccgggtgcagtggctcacgcctgtaatcccagcactttgggaggtggaggagttcaagaccagttcaagacctcactttgggagatcaggagttcaagaccagcctggccaacatggtgaaaccccatctgtactaaaaatacaaaaattagctgagcatggtggtgcacacctgtagtctcagctacttgggaggctgaggcaggagaatcgcttgaatctgggaggcagaagttgcagtgagccaagattgcgccacactatactccagcctgggtgagagtcagaccccgtctcaaaaacaacaaaaggccctagacaacacccatccatggaattctttcaaattccctatagcttgtgctatcagttgttatttagtacctggcaagatgatattaggggaactcatatttaaggagttcatggagacctccttttgtaaatactggcctgactccttaaggttgaaagcttggtcattattctgtttaatctatcactgataaaagttatcacataacccattgtctgcaaatgaactataaaaaacaccttagaaatacaaggggattgcactgtgacctgtaggtcaaagctaattctaggtgagagggtgaagaaacaaatatgctggttgttttcacctaaattctgatcctatgaatttaaaattccttctcatgcaatcattttgtcatggaattgattacaatgaacaaaatccaaagtgctcaggtcactgcctcttcagtttagtgcttacactgtaggatacaccatccaagaggctgtaagggtggccaagcaaagggaagacaacttcagttgggggggtggaagcacagattcaatggaaataagggtatacatcatttaacaacaaaatcaagaaaatgctaaggatgaaacagggtactcaacaatcatgctgaaacaggcataaactaggaccacgccagcaagctaataggtagatgactctactttgaatattaaatcatattacgagccaactttcttaagaaaaaccacggatatctaggattacttgactagtgtaaaatacacagttgcctgaagaacttatctctaaaaactatcacaggccccagctacctcgcactggtaagagtatactgccttttaaaaacaatcactattgcccacattattagtagtattaatgctattaataatattgcactccaatgtgtccaataattgctttttgctaggtatatgcacagcatcatgggagccggagggagcttttacccaacctcatgaggaatgaacgaaggtaggaattggccaagataaggtggaagaactcccagatacacggaccaagataagagcaaggggcaagggcacaggtgacaacacagagcttttgagaatcacaatcggtccactggtcttcctgcaaggcaagatacacccaaggatgagcccatgcctagggcatagccagccttggaaggcttcaaccagggtagcagggtagctaatatttgtttcttatcactgagagcagagaatagaaatcgtaaagccagttaatcttacattatgttaggctattgtattaggctaggaatggtcaaaacaatgttatggtaagccaaaaccaaactcaggggagcaaaggaagggggaggagtggggcttgtaccctgctacaaacctctaggctaggaaatgccaagattgtgtgtaactaagtctaggtgaaaaacttaatcccttaagtcccaaatacccaacttagagaggtacaggaaacggctggtcagcaacatcactccagtgttttaaaaactcagagtacataaacttgagcttattttgcctgttttaggaaataaagaaatataatggcacatagggatttgaaagaatcacaaacacatcagagagatcttatgttaggctgatttataagtgctgctttgggcagttacacagtttgtttacaatgaggagttatttgactttgaacatactgtacatggcaattagaagttgtcatggcaaaagaaaaccacagctggcctgccacagccaacacaagaaccagaaaatggtagatgaaatgaaggaataaaggtggggtttattccttattataaaagaaaaaaaataattcttcagcagtcttaacaaagacatcaagatacaaaattacaagtgttttgactccagccctgtccccatctcctccaagagcagaggtaggagacagttgaagcaaacaagcaattctgtaaaaattacctagaaaccctacaaatttgattaaaatctaaacttctataattttgctttttaaaaaatttaatatcaaaaggcctgctttagtgacatgctattcctaccagaaaataaccccaataccccctctgtcagtaacatgctcaagttgaccagccaactcttatctctaaacctatgtggacaagtgtgtcttttaaaccaaagccacggagatcaagtgactgctagtaacgtgttgtctgttaactaatccagtgcccaccttctccagagggtgggcagggcagaaacccaaaagggtcttgagggcctaatcccagatcaccatctaagaaccacttcccttgctctctactcaaaatgagatgctttatttctaatccgactatttgtctcaaatttggtgccccgtgacctggatggttttttcctttagcaaaacacacataatccacaaaaccatacatatagttttttgtctttacatttaaatataaaaatactattctgctttgtgtgataaatcaaggaccaagcagtaagaaccttttcttctttcaaggtagggatatccatcagtttatactaagcttcgtgttcagagcagggcatttagtcccaagccaggctagtcccacaagcaagagaccaaagccattctctctgattcccaacccctaccttctctcctaattcccacttttaatagaaaagttggttataactttttaagaaaagtttccaccacgagggcaagtcctaacctaaccagagtacgtcaggtcttcccctttcagctacctggaagaagagacccccttctgcaaacgtgctctgtccggatagctacgcctattggacaggtgcaccccattaaatggaagcagtggttatgtctccccaccctcctccccactaatgcactaaaaagcttcagtgatagggaaaaaaaggagggtaggtgtgaagaaattaataacttgacccctctatcccagccaaacaaagaaagcaagattaactgggcacatggaatgaaaaaaacgaccttgatattccaccctttgagttacaatcgggacaactgggagagggggaagagttggagtgggatgaagaactaggaggggctcaacagctggaggtctagtccacttaatttttgtactggaagggctcatcgccggtttcattgagaagacacgtgcggatgagggcttctgtcaccgaaaaggggtcgcagttggcagaggggcgacgatcttcaaagtaacccttcttctcctggccaacagtccggggaatgcgtatgctggcgctacgattggctacaccagcagaaaagtcgttgatgttggaggtttcatggaatccagttagacgtcgggcattgtccaggcctcccttgggatcataggcacggatgtggtactggtgccgcttgcttagtttctcaatggcctcctcgatgtacctagagtaaacagaaaagatggcagtccaaccttgtctccaggtatggagccaagaatgaagtgcaccaaaatatgataccagtagaacaaatacttcatgagggcagtggctgcatcttcttacctgtgtgtctcagtggtgagaacagtgcccgacaagcagtacaaagttactgtttgttgaaaagactaatcatttgaaactttctccccctcataagcattaagcttatccacatgcctgtattgttactaatttagttctaaaagattttcaaatgcatgaatttgtcaacttttccctgtcaccatgacatatgtcacaaatatatatatcgatatatatttatataatgatatatgactaatatatattatataaattat[450 bp omitted]aacgagaagcttggccattaaaacaaagctaactgctcactccaactcagaatctcctaaacctgttctcttctcacctgtactccaacccgttcttaggttttgggttagtgagtggtgtatcagcagcccttactagcaaaagtcctatgtacacctacctacccttcttcattgatggattggagctatacttacctgggcaggcatgacctcggcattagtccccgcaatcttgactccagcatacaagcaggcccggtaatgggcctccacgatgtccctgccataggctctgtctgctcccacaccacagtaatatggacctacagaagcatcaggacaaaacactaagagtcaagaaatccagagaatcccaaagtcagagatcagaaggcccttaagccttgccctcttgaatcactatccttgccttcatctgcaggtgcggggcaggggaggggcaataggggagttcctcttcaccacagcttcagtggggccaaacgttccccctaaaaccttactttatatattcatatccatttttggactttggtgatgtgagggctgtttcgcctttactgtattattttgcttcttgattctgaaagtcattcccatccctgggaaggggcattcctgcacagttagacacttctgggaatttcacctctaacccaaggagacttaccctggggccctgggaagccgttggaaggccaaccaaaggggtgcccatctgtccccatgagggtatactcctgctccatgccaaaccaggggtgctggttgctcaccatgtccattatccgtttacaggtgtgcctcaaattggtctctagaaaaaagagtcaataatacgccatcagggatctaaagacatagatgctgaataccgatgctgatgggagaatagtccttggattctatacaactgaggtgtgcactatggtatgaactgacccagtataggccttcttgggatcaccgagtcagaaaaatgagagaagctgttaattgtacatctgtaggaagactctgaaagacttcagttttaactaaactcagttacaaccaagtcacatgggagtggatttagaacagggcaactttcaccttatctgcattctggccacctcccaagcaccaaatgccaggcacttaaccctctattcacaagacagctgcttctggttgtcagatttattcttcatttctcaggcacttggagccattctataatttttgagaaacatttgtccattggtttacatttgtcctggcctacattccaggcaggaaggctgttactggggactccaagaccggcaaacagatctggacaaatccaatgctattttatgcaaccaacagagaagaccatagaaagatgggccatattatctcttcctcaaagcagaagttcagggaaaagaatcactcagattcttaaaatagtgctgaaattgcctagtcttcccaatgctgatttcagaatgtcttctccctccccttcacagcattcacagattgaggaggggtatccatagctgtgctataacacacctgcaggccttcgattgtacttgaaaacttcacataacaccagcttgttagggtccttacggaaggggtcccgaaacatggcagcaggcacgagatacatgtcactgttggaaccctcagactgtaaagtactagagccatcgaaattccactcaggcaactctggggcaaaaagagggaaaattacatttaaaacatacaggagctttccaagcaatgcaaatacagccagcccttcactcaccttcccatctctaaatatctcttttccaggaattcattaaggtataaatgccatcattaatatgtataccctggcacctgtacctgatcttatagcccttcctatttgagttccaagtaagaccattgtaccaattccttaaaagaaatatatcagatactcccttcccaaatgtcttccaggagacaagctgaagcattctgttatcactaccatcctatcaatcacttaaaatattgagatagtgaaggattctgattcttccattaggtaatgtgttgcatccttcttatgcccccagtgtattctggcaagttatgtccttattttatagatgagggaacagacgactagcaggatgacttactctaggatgctcccttatcacctatccacctttcccactgttttgaaggctgcttggtctctctagctgactgagttctctgaaggcagagacgagactctcactttgtatcttcagtgtctgtgcactatcatctgccacatagcaagtacacaatataggctttgtattatgatcattcacttactcaaaaaggaaaagtaaactaccctaaactaggtaggatatgatactttcctctggcccctttccagaagagggaagactatggcttgttctagactgaaaaatgaaggtcacaactataatctaactgtagctcctagagggatacgcaattagtttaagaatttccaaaagtggcatcaactaaaaattagtcctatttaaaaaccattgtagagcatttgcttcacatctagaagccagtgatatgagtattaaacacagttttctaagagtttgtaaactagatggcattctcaggttagagcagtggttttctgagggtgccttagagccagctaagtggggatgtccaggtcggcaacctctaagccccatgccaactctccataaaccagacttagtttttcttcaatacactggcctacgtgcacaattccattgaaataaagggttccatcgtcgctctgctttgaggcagtgtaggagcttaatgttgactgaataaagtctgaaaagccctgccttagaaaacctttacaaacagaagaaagaggcctaatccagaggctgagtcaaaggctgctgcccacccctctgcagatcccacccagcatgtgctccactccacattgctgtctcaccttccacacacttgggctcactgtccagggtccgggtcttgcagcgcagtccttctccagtaccatcgatccagatatacatggcctggactttctcaccctgaggcagggacatgtacacctgcttgatgcctttatttaagtgggaacttgctgaggtggtcatggtggaaggtgttctggagaagaaaaaaagaataacattgttaacgcccactccaaactgatcccctgcaaaaatggctcaagaaggacgactgaatcaaaagtcagagtgtaagtgccaactccttcccttgtggaagtcaacacacaaaaagttatgtttactcactctttcagggggattagttttatagtaggcaaaaatctcctttataataggctgtaaaactgatcaccaccttttgaaacaattaacacagatgcctgctaaagaaaagatcaggcccttggtagtaactcaatgcctctgcatccctgagctcacaggcttaagttccacagctactgcagaacccaggcttccaagctagaacttatacttgtgaggactaaggtctattccttcagtgtagctgaggttaacactaaactatccaaatactaaactatcagaggaaacaaatcaaaaccaatacacaaatttacaaaacatagaacttcttccaatataagtaaaatccagccacagaacaggcttggcttccacagtttgtttttctctttgtctttcatcctagctgtggtcttaactcaaacccaccgcccctccccaccaaaagaaaactcattacacatttagatttgaggatgaaacaaggttacaatatatttttttagaaggctagcagtttcctacacaaaagctgattcaagccagattctaaggggaatgctgccataatttccataggtctcatgcaaagtctcacttaagatagtgggcaagaatcacaacattatggaattctacaagacttgtcaagtaattaggaaatttccacttctaaatcaaaaagatctggaaatttaaaagccatgaggcatactaataactgccagccactaccacaaaacctccgaaagaagagaaactctcaagccacaacagccgaagaggaaacattctctctctccctcctccctccgtggaccagggtggctagaaagggaacacattgttctcctccaacgactagggcaacgttctgaagtacagtggcaaagtttctacgggcaaccgtccatgtttgcccagctgaaaacataactgcttctccctcagcctcaccacccttccccttggggaagaccaacaccccaatattgcctctagaagactcagccggccaaatcctacttcccacctccatcccagaaccctttagctcccgctaaaagctacaacccaccgaagcgggcagatcacctgaggtacaaagttcgagaccagcctggccaacacgatgaaactcccgtctctactaaaaatacaaaaattagccgggcgtggttgtgcacgcctgtaatcccagctactcgggaggctgacacaggagaatcgcctgaaccccagaggcagaggttgcagtgagccgggagattgcaccactgcactccaacctgggtaacagatagagactctgtcggaaaacaaaaaaaaaaaacctacaacccaatttctcggctgtcctctccaacatgttacaccaccaatatcatgcacactttgtcctaagcctcagtttcggatctcttgctcttttccgtgagccgagttgcatgccagcagcctagtgccactctatcaactgctgctgctgcggtgccaagtttacgtgggggaaatggattctgaagttttcagcagtttctgcagctcccaccaactccggggtcgtcctccctgccccctcactcaccccagccacagaaagtcaagcgtatcgttagggttgccctctttaacccttctctttttggagtggcgttcgcgcctctcctctttctcagactctagctggtccaagcaccggagctttctgggagagggcgatggagaaggggacagacagcggccggcccggggggtgtccgaacaggcaggttggtgggttaaggtcttaatcttgactcgagatctctccccggagttcacagagtaggcgacgaagccgaagcagctggagcgcgacccggaggagtctgacttctcgttgtcttcataattttcattcgttgctttcttcgtggacttgcggctgggggaggatccccgcttcccgcccccgagggagttataattatccactttgagagcagccccttcccactgaaatgtccctaaagtgggcgccctgcccctcgggcccccgtccgaatctcagggcctcacggaggtggccataccctgccgccgaggggttggggggtccgggggagggtgggggcgcaggccgtagggactgcgcgctgctgctgcctccgcccggaccggcttctccactgactgcgccgaggcccgggctctccattgttcggtcacattggaaggcccccgggaccccgaggcgggagccggccgcccaaacaacgctcaccgttacacgccgcaatcgaggcgtctcaaccatcgccagaaccaggacgattgctccgaaggccccaccacgaggaaggcagccaggcgcccgcgccaaccaagcgccttgtttgcgctccacaggggaccgcaccgccactccatccacagcgcaaacaaaccactgcgagccccagggcgcaggccggcccaacggcctccaggggcggcgcttcggccgcaagtagtgaaaagaagatcaaaacaactcaccccgcccttcccagagcctggccaagggcgcgccccaccagcgccagccccgacgggtccaagccaccagcggcggaagcacgcgggaggagcactcatgccggatctcaggcatgggccggagaggccgcagcgtagggctgggactggaggggcaggcagccgaaaaaagaggctgggcggcgcgcctcgcggggtagcaggggcggcgcgcctcgcttgcgtgacaccgggccgtccgggggcttacctggtcgccgagcaggcgggcgggtaaagctaggccgcgagagcgaggttaggagaggagaggaggccgcagtactgctcacacgctccgctcttctcccactctcgactct

SEQ ID NO: 98 - DNA, 13243 bp, Homo sapiens
  source 1..13243: mol_type = genomic DNA
ttattctaaacctttattgaaaggcaaatgcagaaagccttcaacacagaggatagatttagtgactgagggcccactggagtttaactaatagatctgctgactacgccgtacagtggaggaaacacgctgcaatctcaagacaatgcaggtaactcaatctgaaatccatcaaaaagaggacaacttgctcaggtacaaggcccctgaaaagtaactcatcaaatgacaataggaactgtgtggacactccctctgtaacatgcactaggatatcactctcctatattagaggagctccaagcagtgtatcatgctcaaatatttattaattgacagtgtccgacaacctcctgtccataaagcatggcagagtgggtaattaattggaaagagttggcagtagaactttaagaacaattataccttctacatcttaccactccccattcctagtgacaactttctcatctcggcgaattctcttgtgtactgtttctggaacatatattactaaattcctgtctcctttacaaaatgctgtatcttgggcaaaagacatatgtattgtgcttgtattgtgtatctaatgtgtacatatatgcatattctcacaaatatggtatacatttatattatgcatgtgtatggacatatatctgcatattgtaaaatgaaatagaattttttttttcttgagatggagtcacactctgttgcctaggctggagtgcaatggtgcaagcttggctcactgcaacctccggctcttgggctcaagcgattctcctgcctcagcctgccactcggcagggtgggattacaggtgctcaccaccaagcccggctaatttttgtatttttagtagagatggggtttcaccatggtggccaggctggtctcaaactcctgaccttaagtgatctgcccactttggcctcctacagtgatgggattacaggcttgagccaccatgcccggcctgaagtagaatttttttaaatgaacggtcggagatcgagctaaaggctataaaatggcagggttctaatcagctcagattgttttcagtagaaatgtacgcaaagtctttggagttaaatgatgaactgccacttatttatttatttatttgtttattttttgatatgtctcactcttttgcccaggctggagtgaagtggagtgatctttgcttactgtaacctctgcctccctggctccagcgatcctcctgcctcagcctcctgagtagctggaattataggcacccaccaccacatcttgctaattttggtatttttaatagagacaaggtttcaccatgttggccacgctggtctcgaactcctgaactcaggtgatccacctgccttggcctcccaaagtgctaggattacaggcttgagccaccacacccagcctaaactgccagtttacatcagttataatttttttttgtttttttgagacagggtctcactttgttgcccagactggagggcagtggcacaaccatggctcactgcagcttcaagtaatcttcccacctcagcctcccaggtagctaggactacaggtgcatgccaccacgcccagctaatttttcgtattttttgtagagatggggttttgtcatgttgcccaggctagtctcgaacttctgagctcaagtgatctacctgcctcggcttttcaaagtgctgggattacaggtatgagccaccatgcccagcctcagttacaactttttttttttttttgagatggagtttccctcttgttgcccaggctggagtacaatgttgcaatctcagctcactgcaacctccgccttccaggttcaagcaattctcctgtctcagtctcccaagcagctgggattacaggcatgtgccaccacgcccggctaattttttgtatttagtagagacacagcttgtttcaccatattggcccggctggtctcaaactcccgatctcaggtgatccacctgcctcggcctctcaaggtgctgggattataggcatgagccactgtgcctggcagttataactcttaaagcaacacaaggctcttggtagcctgattacaatgagaattaattaagtacactattttccacagtacactcccacgaagtttttagtgctgccataatgtttgtagtaaaaagaatcaacattttcaatttgttttttggggttttgtttgttttgttttgtttaggcaaggtcttgatctgtcacccaggctggagtgcagtggtgcaatcacaattcactgcagcttcaatttcctgggctcaagtcatcctcccatctcagcctcctgatagctgagactacaggcgtgcaatttaaaaaaaaattattttgtggagtctggacctcactacattgcctagaacggtctcaaactcctgggctcaagagatcctcctgctgcagcctcacaaagtgttgggatcacaggcgtaagccacttcacctggccttgattctttttaagctcaataaaaatggaactttgtcttgctgtcatggccagagttaaaatacagtcaaacaacaaagacctcatagagttaaagctcacaaaactgatacttaaaaataacttattaaataagtattgcaggcactacaacaggtctcaagatacagtggtgagcaagaaaaacaggatctcttgctttcatgaagttcaactagaaagtcctgtcgaatgatgagacatctttctttggggcagcaagttactttcacttagtggtaaaagggccaagaatagttcaggaacttctcatccacttgtctacccttctacacagacagcagcacagatctggctttttacatggccctaggccgggtgcagtggctcacgcctgtaatcccagcactttgggaggtggaggagttcaagaccagttcaagacctcactttgggagatcaggagttcaagaccagcctggccaacatggtgaaaccccatctgtactaaaaatacaaaaattagctgagcatggtggtgcacacctgtagtctcagctacttgggaggctgaggcaggagaatcgcttgaatctgggaggcagaagttgcagtgagccaagattgcgccacactatactccagcctgggtgagagtcagaccccgtctcaaaaacaacaaaaggccctagacaacacccatccatggaattctttcaaattccctatagcttgtgctatcagttgttatttagtacctggcaagatgatattaggggaactcatatttaaggagttcatggagacctccttttgtaaatactggcctgactccttaaggttgaaagcttggtcattattctgtttaatctatcactgataaaagttatcacataacccattgtctgcaaatgaactataaaaaacaccttagaaatacaaggggattgcactgtgacctgtaggtcaaagctaattctaggtgagagggtgaagaaacaaatatgctggttgttttcacctaaattctgatcctatgaatttaaaattccttctcatgcaatcattttgtcatggaattgattacaatgaacaaaatccaaagtgctcaggtcactgcctcttcagtttagtgcttacactgtaggatacaccatccaagaggctgtaagggtggccaagcaaagggaagacaacttcagttgggggggtggaagcacagattcaatggaaataagggtatacatcatttaacaacaaaatcaagaaaatgctaaggatgaaacagggtactcaacaatcatgctgaaacaggcataaactaggaccacgccagcaagctaataggtagatgactctactttgaatattaaatcatattacgagccaactttcttaagaaaaaccacggatatctaggattacttgactagtgtaaaatacacagttgcctgaagaacttatctctaaaaactatcacaggccccagctacctcgcactggtaagagtatactgccttttaaaaacaatcactattgcccacattattagtagtattaatgctattaataatattgcactccaatgtgtccaataattgctttttgctaggtatatgcacagcatcatgggagccggagggagcttttacccaacctcatgaggaatgaacgaaggtaggaattggccaagataaggtggaagaactcccagatacacggaccaagataagagcaaggggcaagggcacaggtgacaacacagagcttttgagaatcacaatcggtccactggtcttcctgcaaggcaagatacacccaaggatgagcccatgcctagggcatagccagccttggaaggcttcaaccagggtagcagggtagctaatatttgtttcttatcactgagagcagagaatagaaatcgtaaagccagttaatcttacattatgttaggctattgtattaggctaggaatggtcaaaacaatgttatggtaagccaaaaccaaactcaggggagcaaaggaagggggaggagtggggcttgtaccctgctacaaacctctaggctaggaaatgccaagattgtgtgtaactaagtctaggtgaaaaacttaatcccttaagtcccaaatacccaacttagagaggtacaggaaacggctggtcagcaacatcactccagtgttttaaaaactcagagtacataaacttgagcttattttgcctgttttaggaaataaagaaatataatggcacatagggatttgaaagaatcacaaacacatcagagagatcttatgttaggctgatttataagtgctgctttgggcagttacacagtttgtttacaatgaggagttatttgactttgaacatactgtacatggcaattagaagttgtcatggcaaaagaaaaccacagctggcctgccacagccaacacaagaaccagaaaatggtagatgaaatgaaggaataaaggtggggtttattccttattataaaagaaaaaaaataattcttcagcagtcttaacaaagacatcaagatacaaaattacaagtgttttgactccagccctgtccccatctcctccaagagcagaggtaggagacagttgaagcaaacaagcaattctgtaaaaattacctagaaaccctacaaatttgattaaaatctaaacttctataattttgctttttaaaaaatttaatatcaaaaggcctgctttagtgacatgctattcctaccagaaaataaccccaataccccctctgtcagtaacatgctcaagttgaccagccaactcttatctctaaacctatgtggacaagtgtgtcttttaaaccaaagccacggagatcaagtgactgctagtaacgtgttgtctgttaactaatccagtgcccaccttctccagagggtgggcagggcagaaacccaaaagggtcttgagggcctaatcccagatcaccatctaagaaccacttcccttgctctctactcaaaatgagatgctttatttctaatccgactatttgtctcaaatttggtgccccgtgacctggatggttttttcctttagcaaaacacacataatccacaaaaccatacatatagttttttgtctttacatttaaatataaaaatactattctgctttgtgtgataaatcaaggaccaagcagtaagaaccttttcttctttcaaggtagggatatccatcagtttatactaagcttcgtgttcagagcagggcatttagtcccaagccaggctagtcccacaagcaagagaccaaagccattctctctgattcccaacccctaccttctctcctaattcccacttttaatagaaaagttggttataactttttaagaaaagtttccaccacgagggcaagtcctaacctaaccagagtacgtcaggtcttcccctttcagctacctggaagaagagacccccttctgcaaacgtgctctgtccggatagctacgcctattggacaggtgcaccccattaaatggaagcagtggttatgtctccccaccctcctccccactaatgcactaaaaagcttcagtgatagggaaaaaaaggagggtaggtgtgaagaaattaataacttgacccctctatcccagccaaacaaagaaagcaagattaactgggcacatggaatgaaaaaaacgaccttgatattccaccctttgagttacaatcgggacaactgggagagggggaagagttggagtgggatgaagaactaggaggggctcaacagctggaggtctagtccacttaatttttgtactggaagggctcatcgccggtttcattgagaagacacgtgcggatgagggcttctgtcaccgaaaaggggtcgcagttggcagaggggcgacgatcttcaaagtaacccttcttctcctggccaacagtccggggaatgcgtatgctggcgctacgattggctacaccagcagaaaagtcgttgatgttggaggtttcatggaatccagttagacgtcgggcattgtccaggcctcccttgggatcataggcacggatgtggtactggtgccgcttgcttagtttctcaatggcctcctcgatgtacctagagtaaacagaaaagatggcagtccaaccttgtctccaggtatggagccaagaatgaagtgcaccaaaatatgataccagtagaacaaatacttcatgagggcagtggctgcatcttcttacctgtgtgtctcagtggtgagaacagtgcccgacaagcagtacaaagttactgtttgttgaaaagactaatcatttgaaactttctccccctcataagcattaagcttatccacatgcctgtattgttactaatttagttctaaaagattttcaaatgcatgaatttgtcaacttttccctgtcaccatgacatatgtcacaaatatatatatcgatatatatttatataatgatatatgactaatatatattatataaattat[450 bp omitted]aacgagaagcttggccattaaaacaaagctaactgctcactccaactcagaatctcctaaacctgttctcttctcacctgtactccaacccgttcttaggttttgggttagtgagtggtgtatcagcagcccttactagcaaaagtcctatgtacacctacctacccttcttcattgatggattggagctatacttacctgggcaggcatgacctcggcattagtccccgcaatcttgactccagcatacaagcaggcccggtaatgggcctccacgatgtccctgccataggctctgtctgctcccacaccacagtaatatggacctacagaagcatcaggacaaaacactaagagtcaagaaatccagagaatcccaaagtcagagatcagaaggcccttaagccttgccctcttgaatcactatccttgccttcatctgcaggtgcggggcaggggaggggcaataggggagttcctcttcaccacagcttcagtggggccaaacgttccccctaaaaccttactttatatattcatatccatttttggactttggtgatgtgagggctgtttcgcctttactgtattattttgcttcttgattctgaaagtcattcccatccctgggaaggggcattcctgcacagttagacacttctgggaatttcacctctaacccaaggagacttaccctggggccctgggaagccgttggaaggccaaccaaaggggtgcccatctgtccccatgagggtatactcctgctccatgccaaaccaggggtgctggttgctcaccatgtccattatccgtttacaggtgtgcctcaaattggtctctagaaaaaagagtcaataatacgccatcagggatctaaagacatagatgctgaataccgatgctgatgggagaatagtccttggattctatacaactgaggtgtgcactatggtatgaactgacccagtataggccttcttgggatcaccgagtcagaaaaatgagagaagctgttaattgtacatctgtaggaagactctgaaagacttcagttttaactaaactcagttacaaccaagtcacatgggagtggatttagaacagggcaactttcaccttatctgcattctggccacctcccaagcaccaaatgccaggcacttaaccctctattcacaagacagctgcttctggttgtcagatttattcttcatttctcaggcacttggagccattctataatttttgagaaacatttgtccattggtttacatttgtcctggcctacattccaggcaggaaggctgttactggggactccaagaccggcaaacagatctggacaaatccaatgctattttatgcaaccaacagagaagaccatagaaagatgggccatattatctcttcctcaaagcagaagttcagggaaaagaatcactcagattcttaaaatagtgctgaaattgcctagtcttcccaatgctgatttcagaatgtcttctccctccccttcacagcattcacagattgaggaggggtatccatagctgtgctataacacacctgcaggccttcgattgtacttgaaaacttcacataacaccagcttgttagggtccttacggaaggggtcccgaaacatggcagcaggcacgagatacatgtcactgttggaaccctcagactgtaaagtactagagccatcgaaattccactcaggcaactctggggcaaaaagagggaaaattacatttaaaacatacaggagctttccaagcaatgcaaatacagccagcccttcactcaccttcccatctctaaatatctcttttccaggaattcattaaggtataaatgccatcattaatatgtataccctggcacctgtacctgatcttatagcccttcctatttgagttccaagtaagaccattgtaccaattccttaaaagaaatatatcagatactcccttcccaaatgtcttccaggagacaagctgaagcattctgttatcactaccatcctatcaatcacttaaaatattgagatagtgaaggattctgattcttccattaggtaatgtgttgcatccttcttatgcccccagtgtattctggcaagttatgtccttattttatagatgagggaacagacgactagcaggatgacttactctaggatgctcccttatcacctatccacctttcccactgttttgaaggctgcttggtctctctagctgactgagttctctgaaggcagagacgagactctcactttgtatcttcagtgtctgtgcactatcatctgccacatagcaagtacacaatataggctttgtattatgatcattcacttactcaaaaaggaaaagtaaactaccctaaactaggtaggatatgatactttcctctggcccctttccagaagagggaagactatggcttgttctagactgaaaaatgaaggtcacaactataatctaactgtagctcctagagggatacgcaattagtttaagaatttccaaaagtggcatcaactaaaaattagtcctatttaaaaaccattgtagagcatttgcttcacatctagaagccagtgatatgagtattaaacacagttttctaagagtttgtaaactagatggcattctcaggttagagcagtggttttctgagggtgccttagagccagctaagtggggatgtccaggtcggcaacctctaagccccatgccaactctccataaaccagacttagtttttcttcaatacactggcctacgtgcacaattccattgaaataaagggttccatcgtcgctctgctttgaggcagtgtaggagcttaatgttgactgaataaagtctgaaaagccctgccttagaaaacctttacaaacagaagaaagaggcctaatccagaggctgagtcaaaggctgctgcccacccctctgcagatcccacccagcatgtgctccactccacattgctgtctcaccttccacacacttgggctcactgtccagggtccgggtcttgcagcgcagtccttctccagtaccatcgatccagatatacatggcctggactttctcaccctgaggcagggacatgtacacctgcttgatgcctttatttaagtgggaacttgctgaggtggtcatggtggaaggtgttctggagaagaaaaaaagaataacattgttaacgcccactccaaactgatcccctgcaaaaatggctcaagaaggacgactgaatcaaaagtcagagtgtaagtgccaactccttcccttgtggaagtcaacacacaaaaagttatgtttactcactctttcagggggattagttttatagtaggcaaaaatctcctttataataggctgtaaaactgatcaccaccttttgaaacaattaacacagatgcctgctaaagaaaagatcaggcccttggtagtaactcaatgcctctgcatccctgagctcacaggcttaagttccacagctactgcagaacccaggcttccaagctagaacttatacttgtgaggactaaggtctattccttcagtgtagctgaggttaacactaaactatccaaatactaaactatcagaggaaacaaatcaaaaccaatacacaaatttacaaaacatagaacttcttccaatataagtaaaatccagccacagaacaggcttggcttccacagtttgtttttctctttgtctttcatcctagctgtggtcttaactcaaacccaccgcccctccccaccaaaagaaaactcattacacatttagatttgaggatgaaacaaggttacaatatatttttttagaaggctagcagtttcctacacaaaagctgattcaagccagattctaaggggaatgctgccataatttccataggtctcatgcaaagtctcacttaagatagtgggcaagaatcacaacattatggaattctacaagacttgtcaagtaattaggaaatttccacttctaaatcaaaaagatctggaaatttaaaagccatgaggcatactaataactgccagccactaccacaaaacctccgaaagaagagaaactctcaagccacaacagccgaagaggaaacattctctctctccctcctccctccgtggaccagggtggctagaaagggaacacattgttctcctccaacgactagggcaacgttctgaagtacagtggcaaagtttctacgggcaaccgtccatgtttgcccagctgaaaacataactgcttctccctcagcctcaccacccttccccttggggaagaccaacaccccaatattgcctctagaagactcagccggccaaatcctacttcccacctccatcccagaaccctttagctcccgctaaaagctacaacccaccgaagcgggcagatcacctgaggtacaaagttcgagaccagcctggccaacacgatgaaactcccgtctctactaaaaatacaaaaattagccgggcgtggttgtgcacgcctgtaatcccagctactcgggaggctgacacaggagaatcgcctgaaccccagaggcagaggttgcagtgagccgggagattgcaccactgcactccaacctgggtaacagatagagactctgtcggaaaacaaaaaaaaaaaacctacaacccaatttctcggctgtcctctccaacatgttacaccaccaatatcatgcacactttgtcctaagcctcagtttcggatctcttgctcttttccgtgagccgagttgcatgccagcagcctagtgccactctatcaactgctgctgctgcggtgccaagtttacgtgggggaaatggattctgaagttttcagcagtttctgcagctcccaccaactccggggtcgtcctccctgccccctcactcaccccagccacagaaagtcaagcgtatcgttagggttgccctctttaacccttctctttttggagtggcgttcgcgcctctcctctttctcagactctagctggtccaagcaccggagctttctgggagagggcgatggagaaggggacagacagcggccggcccggggggtgtccgaacaggcaggttggtgggttaaggtcttaatcttgactcgagatctctccccggagttcacagagtaggcgacgaagccgaagcagctggagcgcgacccggaggagtctgacttctcgttgtcttcataattttcattcgttgctttcttcgtggacttgcggctgggggaggatccccgcttcccgcccccgagggagttataattatccactttgagagcagccccttcccactgaaatgtccctaaagtgggcgccctgcccctcgggcccccgtccgaatctcagggcctcacggaggtggccataccctgccgccgaggggttggggggtccgggggagggtgggggcgcaggccgtagggactgcgcgctgctgctgcctccgcccggaccggcttctccactgactgcgccgaggcccgggctctccattgttcggtcacattggaaggcccccgggaccccgaggcgggagccggccgcccaaacaacgctcaccgttacacgccgcaatcgaggcgtctcaaccatcgccagaaccaggacgattgctccgaaggccccaccacgaggaaggcagccaggcgcccgcgccaaccaagcgccttgtttgcgctccacaggggaccgcaccgccactccatccacagcgcaaacaaaccact

SEQ ID NO: 99 - DNA, 13692 bp, Homo sapiens; identical to SEQ ID NO: 97
  source 1..13692: mol_type = genomic DNA

SEQ ID NO: 100 - DNA, 201878 bp, Homo sapiens
  source 1..201878: mol_type = genomic DNA
cactttacaaatagtttatttccaccttcacaaattcatgcgcctctgaccattatgcaaggcaacatgaattaaatacttatgtcagaacatatttgtcttacattattcaagataaagtggattttaaaagcaagtgggtaccaatgatggggagatgaggagaatagggcaggcagcaacagggcaacatgcatttttcaagagtgtttattaaaataggcagtaatcagtacatgtacatcatatgagcagtttttcaaaattagcacttccaggagaggggctacatctcagttttttctgtctgtacagtaaaatgccaaaagtacttccctaaagtacaaaggcatttccctagtagtcttggtaccagtaacaatatgattactaaacatctccaatgtggttttcattacaaagaaacatgtttcacataaaagcttcataatataatccagagacagaatttgtgcatgcttacaatttgaagccaggctgaatatatttgatatatattttttcatttctcccagtgttttttatttttataaatatgcacctagtttcctaccagtttaaaacacacacgaaacactgctctgagcaccatgattgccttacagtagcctctttgggactacaatcctagttcaaggaggggagtactaatttctattctgacttgctcctttccccaaatcatgttagtgttgaccaaatcccatcaattttcagatgcaaacaaaggtttctgggcagagggccaaataataattatgaataatttcacaatgatctggttaagaaaacacccagaaaatgaatgatttcacatgataaaaaagcctggacttgaatttaaacaagagatggacgtaaaagggatgaagcattgcttcattcccaggagggatgttctttactgcagtacccacaaaaagacagcactatcccagggctgatcttcctatgggcctccaccaatagcctttgaggtagatactgatggcttgaagagaggtaggtaaagtccaaatttgttttcaatccctgcaaatgtagcaactgccagtttgtagcccccaacgtgatcaggattcggggcaggcaggttgatcctggatttaggaactggctctgatcccatgggttttctaaaagaagagaaaacagagtaagaagctgtattttttgtttgttttaacttgataaaaataacattcaaaacctgttcaaatatttaatgtaaaggagttgatacattctcatcagttgtatgttccccttggaaatgaccttgttaacacaatttcaacatttccctaaatctcttctattttattatagagactagactgaggtacctttccctacgacaacagagcattagcagcagccaaaatttagcagcagatttagcatgatacttacactcctccaaaatcaatgtagaaccatcgctgtagcaattcgtaagtcagcaaagttacaccaaactggggtgaggatcgaaatacacgagctttaaaaaaatggagaaatcacagatataattagatattttaaaaatttacctgataccaaagagttagttaagaacacattatttccataccaccagctcccttccacagagcttttggtccttcttcacgcagtatctttctaaagcagtctatcactccgctgtaagtggtttggccagcccgggcagccacctgtaatctcgtcttgataacatcagcaggggtcactaaagatgctgcaggcatacctgcaggagagacacaacaccatctcagtctggtcacattctcactatataaaaataactgtgctttgaactgctggccgtggaaagaaagttaaaaatccgattcaataaaatgcctattttgctgtcctctatgggaaatgcaaccatgcctctcctgtgtgcaagatgtctgctcctacacccctccccaccagactcacaccttcccttgcccaaatcactcagccttcatttcctttgtttctattcctaaatctttaaatatttttaagaaattgtttatcaataacactacttcaagtggttgagaataagtggagaaagcggttttcttttctttttctttcctgttgaaatcaaaaacttgcgaagttattaggtccgatttttcagaggtgaagcttgttatgcgtttcctcttcatggtcttctgtggctgctggcagtcacaggaggtgctttctctcacacattcaaccaccccctactctccaaaccccaacctctccagttacaccagaaaaagactttactgatatctaaaaaacactatgtgtgttggggggtgggaggtggaggtttcggggagggggtgaaattgggagaaggagactcctacagataacactttaggatttcttttccctaagactgacatctccagaaaaatatttgacagaaagcttaaaatttatactggctgataatcaatgaaaaaggaacaacaacaacaacagaaaaccctcccaaagttaccaatgggaaatttttctacagtcactgtatccaaaatagggcagtgcatgtttagattttttaaaagcgagactgtactcagaagacactgtctcttatggttttattacttttccattatgaacttattccaaaccaaattggtcaaatgcagatgcataaatctcctttgctttttttaaggcttaataattctgtaagaatttctgtccaaaccaacatggtctggctcacaactacatttcatccttctaacagacagctttaaagttacagtgagttggaaggggggtgtaaatctgcatactacacgcttccatttatattactgaaggagtatctcttccatctttacctagctcctcaaacattaatctcaagaggttttataaaatacatcacaattctgcatgcaaaaagctcactttatatccagtgcttcactggataagtcatactgaaattcctgttcatttgtaggaattattttaactttgggccaggaatttatcctccaacataatggaaggaaacaagaaaaatgcttagaaacccactgtgttcacaccaccgattttgttttacttcctggtttagaaagagtttagcaagacagcctgctttagacatgcaataaaagccgccttgcaatggtgggcaggcatgtcagactgtgactgtgaaagacatacaagcaataaaatgggcaaaaagttccctttggctagggtaattttcataaactcttctttgttatgaaaatagaggtactgggggtgaaggaagcaggtatgaaagacacctagtaagttgcctggcaaaactgataggagttgtggtgaatgctagaatatggcaacttgaacataactcccatcatctccattgtcagctccagtttctcctaggcaggtatctggtaaggcctaaaaggaattttggacatcttggtggacaggagatttccagtgtgaggatttgctaagttaacctggagaactgcaccaggctgccctaaagcaaggctgggaaagcagcagatactggcaagaacttggccaccagagagctgttgattttgggggccagggttggcagggacgtctggtagatctgcctgctctcttctggattccaaaaggctaagccaatgctgatcaagtggtctgaattttctctattcctaaagacaggggagcaagaggagactgggaaacagagatgcttcctctaggtccctcagcaggaaagggactggcaggctgcctgattcttcaatgacaagacaaacacagagacccaggggccatccaccacctctgtgacaggagtaacttggggcatgtctcaaccaattaaaaaattacaagtcttcaaagggggcccagctagagtagaatataatttacaacaaaaagaaaacatgactggcaaaatacagctttagggcacaagtcatcgttaatttttataaatatcccatttatatttataaggaaagtgcttttctttttattgaatacaaaggttaatatctatttattttggatcaaggctgttttccaaatcccctttgcatctctatctatattatctacttaatacgtcagcttctaaaagcagtgtgataaagtttttcatcaggtatgagaaaatatcgcattttcttcatactttgaagctgagagatgacattatacattgatattacatagaaattgatggcgtcttcatagtgaattttatcttttataaaatatgcctgtgtgcttctgaacgctatttaaaaccttgaattccattcagtatggcattaatattgctacttgcttattgttgatatttgcctggtacatatttttcaatcagctgtctttcaatctttctatgtcactgttttatgaaacttcatatgactagattttctttcaaaactcatcttaaagtgtttgttattactaggggtactgaattcatttacagtgcttgtgactactagacttatttctgccatcctatattatgctattttctctgcttccagttatttcccttttgatccccaccacttccctgactaaatatatttaaacgttacatgcatttgttatataggtgtacatttacaacaggtgcaattaattagcatttgcatcctccagcaaggggaggactttggcgcactggcacttttgtccttcctttcatttgtcagtctcccaaaaaccaaccattcttgcatgaatacatataccaaagtcagcaataatggagacctaccacaggtttaacttctatttgctgtttcatatatcctacattttcctccttcttaattcactttttttttttgagactgagttttgctcttgatgcccaggctggggctgcgcacgatcttggctcactgcaacctccgcctcccaggctcaagtgattctcctgcctcagcctcctgagtagctgggattacaggtgtgcaccagcacgcccggctattttttgtatttttagtagtagagacagggtttcaccatgttgaccaggctggtctcgaactcctgacctcaggtaatccgcccaccttggcctcccaaagtgctggaattacaggcatgagctactgtgctgggcccttaaattcactttttaattgcttcagagaaggtctgtggggaagaaagctttgagtccttgcatgtgaaaaactaactttagttttgccttccccctcctgagtgttagtgtgcccaggaacataattacgactcaagacatcctttccttgggattttgaaagtatccagtattacagataagaagatgagaagtcaatcttctattgattcattttctattctccttttccttattacttttccctagggaactcctatgaaacagatgttagatttccaagattaattctacctgtatcttaaattttctctccttttctatctctatattattgctacacattacattctagaggggtttttttttttttgcatgtctttattttccacatgtctaaatttggtctttgatcatatccattatatcattcagaactaacgcttgatatttaattatggcagttcttctattacttttcaagaaagcttctttactgattatttctttcaaatctctctgaggactctaattaattatattaattaattatagttcttaaaagttgtcttctgtcccctgaattgcctgttttctctctaattcttctgttcacttactttgttgctccttcatggctggggatctctggttgtctattgatattattcaagttcaaaggataggctgattagtattatatacaaatgttgtgggtgacttctaccatattctaggtatgcttcacccacaggtctctctcctgaatgggagggtctatgggctttgtgtaactgggtgcaaggggttaggatatgctggcagggtgtggaccctccgaactgctgaaatgtagggaacttcactttgggggtagaagaatttattttaaatccttaattcttcttgggaaaagctgccatcactttattttttcctgcatctgtggtagaagtcttgaattaccttaagtcctgccctactttctgtccattccttacacttatcctctctagggaagtggtctctttctttaaaattgagctctgagcttttaacttggatacaactgtctcctgaagctccatatgaaaaccaggagagagctccaagcctggcaatcctgaagaaagtatagttgcctaactcatgttaatgatttaccctaaaacctccacctccaccccaggcattctattcttcactcaaaggttaacattctccagttcagcccttgcattagaggtagtttctcctgctgtgttttggactggggcatctctcagtccagtttcagagtcaatatggctatttcctttctgctgagggccagattagcattttctagtgccaataaagaattttttaaaaatgcatttcctgacattttaaggtatttgggaagacaggagagatggatgaatatgctcagtctattgtcttgattcaatttcttcattactttttttaagggtttaaggactggttttaaactattataacttaagctttatgtccacataattaacaaatttgtaccaacagtagttttctcataatacacaatctaatgtttgcaaaagcatcatgatcacacatgtataacacacttccacttctgtgtactggaacagcttttaaaggtatttctgtattacaacttaatctcaagctaattaattcaaaggtgagaccatcattacagtttgacttgttcctctatcttatcactctgataaaaatcatctggtatgatagagcattctataaaatttgagtattagatatattttatttgatatcattcacaaggtgtattgaaatgcccttcattaatgataaagcaccatgttaattatagataattagaatttgatttcttaatttcaggacccccgcttcggtcttcactttctgacaaagctgatgtactttggccaatgaacatgaattcaaatattggttagtcttgttctatcttgtgaaataacggagtagatgttccagtatttaaatatagtcccagtttataactagatacatgaacaaaacaaaaacaaaaacaccaaaacccaacattctctaggtgaggataccaataaccacttttgctaaaaagctacatattactaaaacaatctaacctcaaggctaatcaaatttttggaaagaaaacagtgagataacattactgaataattgaaattattatctaaacatagaaagcgtggtcatattcatttaatcacaggtccatattatttataataggctgatgttcagcaaaaaatattttatgtataagtgatcaatttaaatatggtacatataaaaatagccatgagacatttttgttttataagttagaggccaacaattattcattgtagttgcctgaaactccatctaaaaaggaggatttttgtattttgaaagaagcttttctcctattaaatactttctgggattctctgaataccatgtatcctctccctaagaaatgcctttgctcttcttggcaaccacaaagggaatgtgggggcctgatccgtcctccacccaacagcccattcaggattagtgcacatttgtgcttgctcactgcccttcttggggttgcacggggcacacttctgacaaaagtcttgcccttctccacactgaactcagctctgcctgagcatctcagcaaggttccacactcagccctgctcaccccatgacatcactcctgctcactggatatagattttttatgtttattttataacaaaatgcattactaatcttttttcctaattctaatatacttcttagacattttaattttgattttcaggtaaataatcatttataaataatgactgcttcctttcttcttttatttatgccttttactttattttaccatgctgactggaacctccaaaatatggctgaataacaaagatgagagagacatccttgtcttattcctaactttaattggaatggtaactatgacattgaccactggcttctgatatctgttattaaattaagaaagtagcttacttcgcattacacagtttttatagttttgtagaatacacaaagaccatcaagctttgtagcttattcactctttgaagactaaaatcaacagggcaaactcggtattttcccattttaccagaaacgggggatcaggaggaaggtggataataataggaaagtcaatgctctttaggacaaatacctaatgcatgcggggcttaaaacctagatgatggcttgatgggtgcagcaaaccaccatggcacttgtataactatgtaacaaacctgcgcattctgcacatgtatcccagaacttaaagtataataataataataataataataataataataataataataataaaagtcaatgctctatagtaagtgaggcagccagttcccaaaatggccctcaaagatctgcacccttgtgacattcacgcctctgcttctctatcatcttgaggtgaagtcatagaagacactgcagcttctgccttgcttgctctctctctctctctctctctctctctctctctctctctctcagactttgctctggggaatctactgccatgttgtgagggtatccaagttgaccaatggagaggcccacatgacaaggaactgaggcctcctgtcaacagctatgtcattgagccatcttgaaagtggcttctccaatgtcagtcaagcctggctgctactgtgactgcaacttcatgatagacctggtgccagaggcacccagtgagctgcttctaccccacacctgtttcctgactcacagaaactgtgagaaaataaatattagttgtgttaagctgattaagttttgagggaatttggcatgcagtaatagataacaaatacagaaggcatttataaagacaacaggatggcaagagggctgaactaacatcaccacagggatgccaactacttaaaactctcaagaataatgggtcaatgaccgaaaaacaaccatgctttttaccaacaaactcacttcagataatctatttctcttaaaaaaaaataactgattcaacataggggaaaaagcatactactagctatttaaaattttttggaaaaaattaaagtatctaaaattgagaaatacataagatgcagcaattagaaactatgttcggaaagttttaaataatatgtaataaaattactattatggaacatttttgaatacttactatatatcaggcactattttaatcttttcatctattaattcacttaattctcataataatcttgtaaggtaagactattcttatctccaaatacagatggagaaatggcagagagggaatgaataatgtgtgtggttcacacagggtggaaacactggaatttgaacattggtagtctgaccccacaggcacatgtcattaactactttgccatgatgggtaacaatgcttaagacacaaccttaagtgaaaactatctatacaaagtgtgattacagctctgtgaaaaacctgaataggaaaaatgagtaaaaatgttaaatagcaattatcttagagtagtgaaataatgaataatatttttgttatttgcctgttctagtacttttcaaatattttataatgagtaatattagtttcaaaatcatttaaaaaaggagaaaaataaaccttaaatgaaaaaaaatctcaccagtcatttctatagctctggtagaatggattacctccacagagacagaatcgtttctgggtacctgtcttctccaagaaaagagttaaagatggtatttttatggtgtgaggaaagtgaggcttaggaaagagtcctagaccttgatctgagctctactacttaacttctaatttcacaacttattttttggagtgatttacagacagattcttttggattcaatgtaatacttggctaatgtttattgagcatttactgtatgctaagaactatgccaagtctttcacatggatcctctcatttgagcctcacacacactctgtagcaggtgcagttgtgatctccatttatagctgaggaaaccaaagcttacaagaagtgaagtaacttgcccaaggtcacacattaataagtggtactcagttattctcattaggtcctaccttatttcaagtaaataatttgaaataaattataaccctttggttcaaaacattttctcatttacagatatatgagaaattacatataggccaccatgagtcaagctggaattaaaattgggaattttatactcaactcctgaaatcatgatctcttgctctagatacagtggtatcactgctgctaatacaactgaggtttctaagcagccaggaaacagtagccctgccttatataccaatatcactgcctttgaaggaaaaggattaactaagaattaaggaggagctacacaggttcctgcatccaggggttccccaggctgcagccagggtaggtggggtgtgcacaaaacagcaaacaacttctcaaagctgggagttgttcttatgctatctttgagaaaagcatggagactctagttacatatctgatgagaatagcacaggtatcaaaaatgtttggatccaggcatcctgtgaccgccttagggtttgttaacttattaaatgtcaccacttggagagctaatccagactgttcctgctcttagggacccttgaaaagaagcagcatcaaaaaatgaactgatccctggcatggttaattattttctatcgatgttttcaatggagcactgaaaaaaagaagatagttatttccatctgtgatttaattaccaccatccccccgtaacacagggaggaaacaggtgtctctaattggcccaggtcttttctggttctactacatttcttttctctaactattgtttaagttctggacaggcttttatgcactattttttttagacatctttaagacaaacctattcaaatctttaaaaacttccagctaaacagttattcttatgctgtgaagtgagactatgaaatgatatggaacttgaattggagttccacaataccacaaaataagccaatatttaatgagccttttctagagttaagaaattaagcttgtctaataatctcatctgccagaatgaagattaattttttcccttttttttcagtagctcttcaatctctagcaaactcacacataccctgtcaagaactatcagcaaaaaaatttcaatgtagtagcatgcagctagggaaggggggcagcaagggtcagggaagtaagagaactccatgggggacactcaccagctatggcaccagctaagagcaggcttcctgggctaacctgcccatcttcatttgcaaaggaagccttcacatgagcatagcacggaaagtagatggccgagaaaggaatgtcccgcagaaagcatgctttggcaccctgcacatttgcaaaggaagaaaaaccacatgaaacacatatcccattgaggagatcaagcttctctggaactcacctcagaacaaaatattcctggagaagaccaaatttgtactcacacattgaaaggggaacagaaaaaaataacccaaattctgcaagtaataaatctaaactttgtttttaaaacaaaaactagttttgttgtgtgctgtgatgggaggagggcagttctcatttattctaatgctaagacttcaattaaaacctttttggaactctgcctgtgacatccttttaaatccctactggtggcaagccactggcatttcaaggaagatctgttctctggtctcaccaaagacgggtaacggcagtcaagatgcctctttgtttacacactaggaagtagacaaattatacaggtggggggaaaaggggtttgctttttgtacgtttggactgtttcccagaaagaaattacacatacataaaaaattatatcttttcagggggttcatggatccttctaattttattatatacttacttacctgccacccagggtttatgaaacattgataaatgcctgctctaaagcctgaaatattcacaataattcggatacattttaaagctgtgtgtagaacaatcagttcctacagcaaagtcttcaacaaatagtttctgttgccaacataatgccatgcagaggccccgcgaattgatgagtgcccagaaatatgatatattatgatgaaaaccacaacacatatattgtgttttgggtagggtgaataggaaggaaatcatcacttttcaacatgtaatgatttaataccatttctttaacagatttctaataactaaaaatttccaccaaatacagagattcccaaaagaaaataatgaatccagccagagtcaacagatctagccacacccagtgacacttattgaggcctagtaatgctggatcttgggtatttctgtctgatgctccaaactgtcaaagttatttaacactatgtatctgttactatagcctttgttttcctgacacgcacatttcactcctgactcaaactgagcttgtgggtaataaaacccttagtctttttcatatgaattactattaactcaagtctactataacttaattagttgcctcacacaagtaacacaggcaggacatcagatttaatcctattaagttgcatcctagtttggctcatcctgccaaccagaacaaatgcttggaatctggattctgtcatgttggctcttcctcagtcaacttacccatggatgtgtaagcatgcctctgttcactctgtgtatacaggtattcagagaagcactcatctacctcatgtactgccaaccggctcaggcttctgtatcttgtccacccccaaagtgttagatgtctaattaagaatcacaatatccaccacacccaagctagtcattttaggcacgtacaaactaacgtcctggacaggtaatctatcgtcctggatgggtaatctatcaattgtgcatttaccgagggctatgcccttggcttgttcagagggcaccctggaggtagttccagagacaagtccaaaactcaatactctaagagttttttccacttctcccagctctttcaaagggaaaacatacagtataatgttaataactgtgtgtaacatccaatccttttcttacaactagttttttaaaaagttataattcgggctgttattgtataaggctaacaatatcagcgtttagtttctgtttttccttccttttccctttttgccccaagccttcttgtaagtgctgctagctattcatccacatgtagattcagtccagaagatactcaaattagacatcaaataatcaactcaaatgaagatcactttaatcccagctactcgggagactgaggcagaagaatcgcttgaacccggaggtggaggttgtagtgagctgagatcatgccactgcattccagccagggcaacagagtaagactccatcttaataaaaaacataaataaataaaaaataaaaattaaaaaacattatttcttggaaaaacatatcagaaactaaaaccaagcttttagcttttctttcatttgttgttttttttttttgatatggagtttcactttgttgcccaggttgcccaggctggaatgcagtggcatgatctcagctcactgcaacctccacctcccgggttcacgattctgttacttcagcctcctggcctcctgagtagctgggactacaggtgcctgccaccacgcccagctagttttttgtatttttagtagagacggggtttcaccacgttgggcaggctggtctccaactcctgatctcaggtgatccacccaccttggcctcccaaagtgctgggattacaggcattgagccactgcgcctggccacttttagcttttcaaacaaagacatattatttgttgggaatgtaacaaaacgtaggaggaaacagtcactaattttgtattgaaacattaaagtttaaaaaaagggggcgaggggagaaagagaagcagattaacctgtcttatgctatgtggcttcagtatgatcagaaggccatgggaagacatgactcgaaattataaacatccctgaggcacaggaagagtaaaggcacatgaagaatcagttgggtcttctgaagaaggacccactgagtgttccaccttctgagaacctccttcttcttcctttcctgaaatcatgacagtaaatcatgtatccctgttacaatggcatctacaagagatgtgagatgtacttcaagagatgctggaaaacaactctacatggctgagatgagaaatggcttgattaaaaaccaaacatacaaacaattttatatatatatatatatataaccctgaggaaagggtagaattgcaacactaaaggaaaaatgcctagaaatgggttgtatttcgttttccaggaatcaagcaatgtggtcaaagtgtttatgcagactagaacaaatgttaggatatgcaagaagtctttggtgtctgattacctgagaaaaaggaagaaatggaaaagtcaaggaagcaaaagaacttccacctggtgtgatcatcctgtcacccctagccatgtgatgagcacctgtagaaatcaagctcttaagcttcctcacctgtcaaaaataccaaaggccatcttcttcaggtgactgggacaactgaaactttaggaatgaatgaagtaatatgtgtgaaagtccttgtaaggtatccactgcattacaaacattaaaggacacaaatgtgttcacctgagggctgtgtctccctgcctctcctagcaccttctctggtgtctccctgcagaaaatacctctcccagttgcgtcaggaggcggcccttcacctctcttgcaccccaggcatcaaagcccaattcccaaggaaagacagagacttattaaatttccctggcctctttttccccaccacttcctttaggtcttaggcataaaggcaggtgccaatttgtaagactgccttaggcaatacctgacctgttgctcttgcacaatgaaaagggaagcaggatgttaaaaagacttaaagttctaagggggaaaatgtttctctcccagattccttgataaatccttcactttgtggtgaacacccattctccagtactacagcaaaacataaacctgtttgacttgaattctacttgttccatgtataatttttaccaagagatcagccattctgaaaaggcaactttataacaaagggaaacattccatgctgccctagagcctgcatcagcaacacaaaaatattactttggccatttgagaattaataagttacaaaggtgtgccacttaaaaaaaaatatttaaacattcctgccatataagaaaatccccacattttcctgctttggttttttttttttttttttttaaactggttttctaggcagctctgcccttaaacattctctgattggtcctgaatttcctcagtatatactataatcagttggggaaaattaataaatgcaaaatacaatcatctaatctctctaaagatgataaactattgggtttttctttttaaataaaaggcacactaatatccagacagggacaacaaaaatcatctcagggtagacctacgttataaactgggaaaaaaccctcagatctagtttaattatcaactctgcctccattccaattctatatcatgccaaagtctctccatcatcatcctatttaagatctagaaaagcttctttaagggtaggcctcacttaacttcaaattaatagtccacaattgacacaggccaattagataggcttagagattctggcggcagcatatcatggcaaaagaatcatttattttgcttctcatgcctttttgatgtggacactgtgctgaaagcccaaggaagctttaatcaattctcaagttgctaggatcgtccactcaagtttattttgccagctctgcctggtatgaaactgtcaatagatataacacaacaggatttgtatctctctttctctcgcacgcatgctgttgcacatgcacagcaatttccgatgtctctttttcttcttttaaaactcttcatcttggatggtaaatcacctgcccaatcaatccaaagtggggaaaaaaccagtcctgaaggatggtgctgataaagaagtcagggccagggcaggtctttttgcatgctaattcctgcttattctagctgtacctgcaaacacagctctaaacagactatttctaatacagggaaaggtaattacactcacaaaggcacctctgtgtcgggccgggcaccaggagccagcaggtctgggagacggaggcttaacagagactccagcagtgaatgcacattgtctagcacggggaaaatgccagactggggaccctgcagcattcaagacaacagtggtgcaccttgtctgagaaggttattcaatgcttctggcacctgtcgtcagagccacccagccctcttttcctaccttacaggtttagaatttatttggcatgtataattatatattttgatcccagagctacaaacaatgggcagcatgtcatgacttgatcccttagcattcctcttggcttcccccaagcaagttaacccttagatacacagcttggcagtgcctctccagcccagtcaaaggatggttagaccccacctacatggctgagatttgaggagggtgagtttgagtgtcttgctgagaaatagcaatggtgccaagacctattatgtgattgtgtcacttgtgttaaaaccaaataagccagccaacatttgaagacttgatatcagtgaacatggaaattacttcaatttgaatatgaaatatgaatgactattacttggcttctttaatccagggactttagggatatgggttctccttaatttcattgcaattctaacaaaatcatcttgacaactctgtttcttgtaggaaatgctgcttgggtcagtgctagttctctattgttctagtattgtacactgctttgccatcaacaatgctcatcactgagatggactgaaaatcctagacatggtacagaggaatgttatcacatggaattttagtcctgaagctgctagtcatgtcaccttcacaaagctcatctgtaaaacatgttccaccttttctttatttctttattattattattttttgagacagtgctggagtgcagtggtgcaatcttggctcactgcaacctccacctctggttcaagcaattctcctgtctcagcctcccaagtagctgggactacaggcgtgcgccaccatgcccagcaaatttttgtatttttagtagagatggggtttcaacatgttggccaggatggtcctgaccttttgaccttgtgatctgcccgcctcagcactctctgctgtgattctgggggctgcctgattcacgaatcattcattgtacaattaaactcccttactttggctgaagttttacttttaacaagactaaacatttaccactttttttgctattcattcctgacacatctccacctgggatcaccttccagaatttccttcattaaggttctactggtgacacactttctgagttttgctagtctaaaaaatatctttacccttgttcttaaaagcaatttttacagggtatacaagtctaggttgaaaagtttttttcctccacatactgaagacaccccattcaactgtcttctggcttccactgttgccatttttaggttagccgtcagttcaactgttgcccctttgaaggcaaattgactttttttctctggccactaaagagcttctctctagctctggtgttcagcagttttcctctgatgtgtctagtctggattattttcaattatcctacacctgcaatttgttgcatttttttctttttctttttttttttttttgaaacagagtcttgctctatcacttaggttagagtgcagtggtgcaatcatggctcactgcagccttgaccccctgggctcaagtgctcttcccccctcagcctcccaagtagctgggactacaggtgcatgacaccatgtctagctaattaaaaaaatatttttgtgtagagatgaggtctcactatgttgcccaggctggtcttgaactcctgcactcccaaagtgctggcactagaattatatgtttctcttctcttgccccttaacatagatcatttttaaggcaatgatactgtacacatctttggtactctagcatctaatagtgttagcattcaatatacatttggtgaaagaataaaagaatggttaaaaaaattgatcatttgctgttactttaaggaatcctttttttctggtgtctttagcacactcaattcctctgggcattgttttataaaaataatatttttcaagccatctccttttaatttgctattctaaagttcaaagcagaagacctggcctggagaggttgttgaccacacagcattggaaattacccaggactggaataatgtggaagaaactaggtattcctgcaagaatcccttagttgacactcaataatgaaaagttgataacaactaacacatcatgtgtactatgtgctcaactctatcctgtatgctttacatgcattattttagtaaatccacacaacgatactatgaataggtaggtatgattattatcctctttctacacacgagtcaatgattcatctgaagcacaggggaagtttcgtaaaaagaaaaatttttttttcaaactaagtattgggtactatgctcactacctgggtaactgaatcattcatatcccaaatcccagcatcatgcaatatacctgtgcaacaaacccgcacatgttccctccaatgtaaaataaaatttgaaattattttttaaaagttctttttttttccagtttttgtttaatacaagctttaagcagagattatggacattacatgacctgtagtatttttcaaatgttcacacatattagatacaaaacctgactccttgaggtatacttgataccctctccttaaatttctaaaaatccttccttaaatgagagaataaaagtccatcaggagtaaggcacaacatttttatttatttatttacttatttcaatttttgatgttggtatatttgtgaaaagactcagtcactctctctcatacatcaagaatatgtacacttagacacctcatatgaatagaatcatgcagtatttgaagttctgtgactgccttgtttcacttaatataatgtcttccagacttatccatctcattgcaaaagcaggatatccttcctttttaaggctataatataccatattttctttatgcattcctttgttgatagacatttgggttatttcatagcttgtctattgtaataatgttgcaatgaacctggtagtcatctccttcagatatctgatttccattctttttttttttttttttttttttttttttttgagacggagtctcgctctgtcgcccaggctggagtgcagtggcgggatctcggctcactgcaagctccgcctcccgggttcacgccattctcctgcctcagcctcccaagtagctgggactacaggcgcccgccactacgcccggctaattttttgtagttttagtagagacggggtttcaccgttttagccgggatggtctcgatctcctgacctcgtgatccgcccgcctcggcctcccaaagtgctgggattacaggcgtgagccaccgcgcccggcctgatttccattcttttggatgtacacccagaagggggattgctggatcatatagtagttctattttaactttttgagaaaactccatactgttttccacagagactgtaccactttacatttctaccaccaaggatctcctttttttttttttttttttttttttgagacggagtctccctctgtcacccaggctggagtgcagtggcacaatctcagctcactgcaacctccacctcccgggttcaagtgattctcctgcctcagtctcccaagtagctggaactataggcacgtccaccatacccggctaattttttgtacttttagtagagatggggtttcaccatgttagccaggatggtcttgatctcctgacctcgtgatctgcccgcatcggtctcccacagtgctgggattacaggcgtcaggcaccgcgcctggcctaccaccaaagatttcaatttctccacaacctcaccattgcttatcttttgtttttttttttttttgctaatagctatcctaacaggtatgaagtgctatctcattgtagttatgatttgcatttccctgatgattagtgatgttgaaaattttttacatccttttttcacatacatacgtgttggccattggtatgtcctctttggagaaatatctattctagtcctttgctcatttttaaaatcagcttctttttcttcacggtagcaccagctgatgtcatattaattttgcgcattcctttcttttttctttcttttttttttttttttttagacacagcatctcactctgttgctagggctagagtgtggtggtgcaatcatatagctcaccgcagcctcgaactcctgggttcaagtgattctcctgcctcagcctcccaagtagctgggactacagatgtgtaccaccatgccccgctaacttatatttatttatttttggagggatggtgtcttgctatgctgcctaggctagtcttgaattcctggcattaagagattgccctggcctcctgaaatactgagattacagacgtaaggcaccatgctcggccatatctttgttctcttgatagctgccctgtcctacccaatatactgtgagcagggacttggctttaaacagccatctcctaaaggctggaacagtgcctggcacacagtaagctctcaatgagtgtgttgagtgagtgaattaatatgatttacattttaaatggatcactttggctgctgtggcaacagtggatttaggagagtcaagagacaaaataaagaaagccctgaagaggctttcacagatgctcagatgaaggataaaagtagaaatggatgggtgagaactaccactaggctggttgtaaaaccacagcatgtccctgggtatcagaaaactagaatggcaatgtgttctcaaagtagactaaacaactgcttccttcaggtccggctgtgagcacgtaaaaatacaagtttttaaaagatgataaactgaagaattaatcttatgagtacttatatgttaccaagaaaaaagggataaactgaaaaaaactggataaaatctattaacactaaaaagtgcacatgtcctttgacctaacaacttcaatgctaggaatttatcttttctaagcaatcacaaaagtatgtcaaaatatacatagggatgatcaccatggcattgcttgatatatcttcaaactagaaacatattcatcaacagcaaacagttaaacaaaaaaatttccatagttattaaataaaatgaggaaagagctttaagatatattgtgtttgaaaagattctatttgtgttaaaacacaattttacttaagaaaagtaaaatattctcctttcattttaattttagattcagggggtacacatacaggtttgttacaaggatatattgcatgatgctgaggcttgggcttctattaatcctgtcagctaggtactgagcagagtacctgaaaggaagcttttcagccctttcctcctttcctctttcccttcctcctgttggtgtctttgtgctcatgtgtacccaaggttcagctccaacttacaagtgaaaatgtgatatctggttttctgtttctgcattgatttgcttaggatagtggcctgcagctgcatccatgttgctgcaaaggatataatttagttcttttttatggttgtctagtactccattgtgtgtagtttccacattttccttatccaatctcctgttaatggtaacctagggtgattctatgtctttgctatggaaaacatacatacttttctgatgctgatattcgtaaaatttttgaaagagaaatactaatctgagcagaaagtttttctttttttaaggatatattaatataaaatcttcagcagtggctatcctttgaagagaatggagcagtaaagggtagagagataattttacttttcttcatacacctttctaaattacttgatttttttgaaatataaattatattttactttttaaactaaaaaaatcaatctctctttgagataactggcagaataaataagaatgtactgatatatcataacttgctttctgagtttatgaacaatagctccaatgaatcatttatacacacattatagatgaacacatgtatacaacatttatgtatatggataaaaatatctttgaatactgtcaaatgcagtggaaaaaaacaacgcctttgattagaacacagcagacagagtccatattcctaagtgaccctccaaggtagaatcaaggtttaatttgtgattatagaatttgaaaacttttcaacagtgcttgatggatcccagctgtcattgcttcactgaccatgttttgtactcaaaaagagacatggacagttccactgcttcctaacgaagcgtctttttggcctaattagctgtgctgccatttactgttaaatgataagtttcattccattcctaaagtataatttgtcccctcattaacgctctgacagctcctacggaaaaggtaatgttcaaaagtagatggatacaactttttttgctatgttaagtttatttgacttttatttttatgctccaggggtttatgcaataaaacagaagttatgcagggaaagggaaatacattctcataattctttttaaaaagaagtagacattgcagatttgttttcttagctacattacattcaaatagctctttcaaaggcaattaattatgctgccttcacttcagtcacctacatcctctgtgctataactaaatctctctaaatgttagcattttagaggggggctttatttacattgtttactatatttgtgctaaactatttcttactttaggaatgcaaaatgtttaccattttccactttttttcagttgcaaatgtatttctaaaacaagtattctaattgccacttactgggaagtcagaatagtttgcttattttgcaagtcaatacagaagaaaaacagaaagcctgattttccaatttaggtaaggttaaagctcagcaggcctaaacacacagacagagccaaccactcacccttcttgggtctggcattgtaatgttaacaacagaaacaaaagaacagagggaaggagaaagattacctgtctcaactaaatctaggacagtggttcttctttttaaagacccacctggagggacacataccaggtttaaaagtactgtgtgaggtcacccctagtcatttgcatttttctagccaaccaggactagaaacagaaaagctttattactaaaaagtgctatcctgaaacaaaaacacattaaactacaaagcaatgctaatgctgtgatgctccctagaaagatggatcttaacctgctgtgatgtctgaccacgtaaaggtgaagtggggtggggctggagaagagaggttcacatgaaacaaagcccaagacagaatgctgggaatatataaatgaggaccaaccagacttgtaatacaagagctaatcagactgaaaggagaccaaaccacagaggtcaacatctgctgaatgaaatcctgactcccgggtctctgaatgtagctgatactgatgaccaacaggaagatagagattactaggtcactttcttgcaacaaaatcaaggttccagaagctcaaagcattactgattttcttggtaattaccagtacaccaaaaacagcattttagaagggagcaccaagccctgtggaatgcttctgaactagattaaactactagactagtaattaaactaacttcatatgggagagttctcttgctcaaacttgagcaatcctgctcatttcaggaaagcaattttagcacaaaagtggaaacaagaaacttctgagcctcaatttcagctcagataccatggttggcagcctctattcacctgaactacaaaaccaggataccaactacttccaagaagtgttaaaggggattaagattattaaataatgtgaagatgaaaagcactaagtcccagtattgtatcatttgcaggtagtttaacagtctctgtttctgtatcagcaaacaagttcctaccattttactcatctagacatttcaataacagtcactgccacagtacctaagtgctttttaccagacaacccattgaaagactcctggcatcttgtcaaaatgacatgctgctacatcatattacagactgcaagagcctaaaaatttagaaaagatgatttttcttcaaattgatcaatgctatgcctcatgacaacagtgtttattttttacagctgggtaataaattggtaagcaaaatagctatagaacattgtgttatattgtagaatcacagattgagcattttaagttctacttaaaaaaacagcaggtttattcctaagtaccacatatgcctaaatataaggcaaaattttcccctgctaaaattaatcccagaaaagagggcatcactttatattcaatcttcacaaagtctcagatcatggagtactctttccaatcacttgacctggagaagcagagtaccattcggggaagggagattctcctgagacagccacaattattactaattctggatgtttactgaggtcacttgcaaaactcaggttagaaagaaaaagagtaaaaaagtatttctgggaggaggatctcacaaatactgtgtcaaatgtcaaaacaagtcatttcaagtttactctagcaatatggtaagttgttacattatggggaccagttatatccattcaggattaactgggaataggaaaaaagcaattgactgtcttaatattatgtgtctatgggataaaatttgcaggaacaatatcatacataaaagtcaaaaatgcttcaaattacaaagcttgggataaaaatgaagacaatgtattctgcaaaaccatgctaacagatgacctaaaaagtgggttaaatggagctcaagatgctgattcaaaattcatgaataattttaatatttcttgatatgtgtttatagaaacaaagcagtattaattttatataatgtgactgtatacatttctgtgtaaataaatgaaactatcttaagtagacattttatttttctcccatatccctaaaggtttacttagtcaagctagcgtaaaatgtttttttaaaaaattcttcattgaaaacttgtgtatacattatgtttgataaagccttataggttggcatataggcagacagttctagtaaattccattataactttttggtagagcagtatgaataaaaaatttcaagaatcatctagaagtttggttttgtaatcattctgaaaaaacattttctaaatgaaaaatgattaagatttataataattaagacaaggcatacatatatagagaaaacatggatcggaccatatgcataggatcagaaaataaattatgatacaggtttctccttgaactgaactcagcgtatcaataacaaatccaaataaaattctagccagtgttgctgcaaagagctgcactgaacaactctagagggcacgattcctatcatagtcatcctagatttgtgtattgatgaggatagttttttggcagatggcaggaaggggcacctccttctaattggcatgaaggtgcctctgcagcttgggtagaacatcttctccaggtgtagaaatgcaaaaaaaaatggatttcatgttgaagaatagtttctgcattaggagatgagaaagtaatcaaataaatgactaaaaaaaaaaaaaagttaccttgtagatcccaaaaaaccccaggtcccgcacgacagacagagcactgactcgaggaccagtggtgatttctcctgccacttgcaaacggatcttgacgatttctaaaggatttgtgaaaatcacctgggagcctccagcctaaaaagaacaaaaaagatttaggatcaaagcaaagaaatggtaaggtgggtcaggaagagatgaatgattattctcaaggataaaaatattctatcctcaagagaatgtagtttcagcccttgtcccatcaatcaaaacggttagggattacaagtatgaatcaaaatacagttactgcctaggaagaagccctatgtccttaatgtggaggctgaaggagggcaaagaccagagatttctgttgacctccccaagtcctcacactgaaattacaaatgctccttgaagcacaaacaactgccaccacaggactcaaagccaagggcacaaaggcagtaataaaatgaaaagcattcgtatccaaatgaggagacacagaacgtatccaaatgaggagacacagaacgtatccaaatgaggagacacagaacagaacggggactaggaggacaaaggctcttgaatgatgaatttcatgattctggcaacgattcaaaaactgccagcgaacacgtaaacttagatgaaagttattatttttttctcttagaaactcaagtcaatcatcaaatctcattttatggagttacatattcttaaaatttttgtttatgtattacttgtgtacagaattgctcttttcatatgagataagtggtatatgaaagtagcaaaaatatgcactaagtcaattaccaaccaaactttgaacatcgtgtgttatttcattccagcaatggctagatgcctcacctccaagatcatcagtgaaatctttaaagtacactataagggaaattttaagctagctattttgaagctaagcctatatttatcacaagcaattacattctttcttactgtacttcaacttgttattccttgtcacacatatatgaaatttttatatcatccaaactatactgtactaattagaactagctacaaggatggcctttgaagtattatttataaaagctggaaagaaaaattagaaacaacataaatatctaatggtaagggatgggttaaatgaacttgagtatgttcatgcatggagatactatgcagtcaacagtgaaaaatgttcaatatatacttttaagtaaaaatgctcatatgtttaaaatactggtacacatttccccctgccatcccctaccaccatgtggaagaaatacaccaaagtggtgcttctgaagtggtgggattacaagtatctttcttttccttttttttttttgatgtatttgaaattttttctatatagatcatgtgtgacttccataaagaaaaataaacacctatacacagtttacctaatatgtgtaatgttaatgaaaagaatcaaagaaagatgttcgttcattaactctctaaatcaaattgtttttccatttttaccaacttgataccttaatcaagtcactcttgttcttccttaagtgcaaatgaattttttgtttgggttgggggacaacacaaaataccaacctgggttggattcactgaaaggcccaagaaagggccttagtctaggaagtagagtgtgagatgatacacccacaggctggtgcattctggtccacacaaagacgtgctgctccccgccctactgctcagaacagctctgttttgctcagatgctgctgctgcaacctgcaggtccatgagaagaacaactccctggttgtttacagcccgtgagtgttttgtgaatttgcacctacatttcccatgtgatatggactcagctatttacggttggcagaatgatgagttgaaacacacctaaccaagtaaccatgtgagaggcacggtaaggattttctctgtgtttctgaaccagaactcttcatacgaaaatcttatgaatagttagaaaaatgaatagaaatttaaaatgtaaagattgttttatgggggtagaattgctgagaaagattcaccaggttggaattagcctgaagcctgattttttgaagctcaaaagagggtaagaccatctctatccagggtaaaatgcaaagtaatcagagaaaccagtcttcttggaagagagaagaggcatacaatgcatattcatccaagcactgccaacagcagggaaggaggcagttgagtgtcccacatgaaggcagagcttcggtctccctatttgtcaaaccatctcacttactatgaagataaaaagagatggagaatgtacaggagccagcacagtgctcaagacagagcctttactccagttggtttctttccctttttctcctacgctgatgttttcctccatagatgcatgttacaatcacttgcagacctttttaaaatatagtgacctctggacttcagtcctgacagtttaataagaatttctgcatctgtccttgctaaaattttcctatgagattaccatgtgcagtgaggctgagaatccctgcactacaccatctgcactacaccatctctagaatctctgtcaattctgagaatcagcttaactggcttcttgaatgccacagtttctaatcccagtcttccatatcatttcacgaataacttttatttgttttacatctgatctcacaacaaactctttctacatatccaagtggtgctgttatgaaagggtacaattcttaggtacggaattgtcttattatctcttatctttactaacactggtaaaagttgctagcattatatacaataaaacaagaacttacactcaactccctgactccaagccaaccaacagataacaattcttttaaagcagagttagttatcactagggatgatgaggagtcaaatccacttcagagagctgcaggaggcagatgcacggggaagaaagaatgtagtgatatcaagaaaacataatgatgtacccattatctgtggtggcctctgaaagaaagaacctacagactcaaagtggcacattgtaaaggtgctgaagatgaaacaggccctttggagtcgaactggaaggaaatgagagactccaaggcaccaagagaagatgcttatcatcagatgcatggtgtctgggtctctccacgacttgatcactgagcagcacactgcgtgccgctcttccaattcctggtctattatgcattcacagtaccatacccatggttcctcttttgcagagatcaaagatagctgaatcggcagacaatggacaggaacacctattgtgcacaatgtctttgcgtccctcatcacttgaaagctctggctgtgtgaagatactgttttttttgtgtgtgtgcaattttgtcacaaatcatttccctatgacttactggagtctgtggcaagtaggacatgggaaaatattccatactgaactggctcagtgtggcatattatatttacagcggtaacactgacttttctacatgtttcctggtatactctttgttattgaaatcttagttatcatctagtatctggatccatctaagagagaaagagaaatgcatacaattattatagactcacttctgctatttgatttttcattcaccaaatatttataagcaattcaaagtttgtcctagaactgcaaggacacaagatgctttattctcattctcaagaagcttgaagtagtaagggtagaagtcatgaatattcattaaacatctattatggggtattaaggtgttgctttgcatatattacatattttcagtccactcaagaggtactttttgcagattttacataagaggaaattgaagcacagaaagattaaagcaactgttatgggctgaactgtgttctaccaaaagtcatagttgaagtcctaactctcaaatatttcagaatgtgactatagttggaaacagggcctttaaaagagaaattaagttaaaaagaggtctttagggtgggacgtaatcccatccaactggtttgttacaagaagagaaaactgagacacagacatgtaggacacaaaagagaagacacagggaaaaagcggctatctacaagccaaagagagagacctcagaagaaaccaaccctgccaacaccttgatcttgaactttcagattctagaaatgtgagaatataaattttctgttgtttaagccacctagtttgtggtattttgttttggtagcactagcaaactaatatagcaacgtacccagggctatatagccagcaagcagaggaaaggattttcaatggagttcagtaactatatgcctcataaatacagaaaatgggacatgagaacagataattatatgataagatccaaggtccagacaaactgatatgacagttcaaaggagggcaagagctctcctggctgggaggtgattaagccagtgagaaggtaacatgttagctggggactacagtgtgattaggattttggtagtccaggcagagaaaggcacaaaggaacagtgacaagggcatatcacacttatatgggtaatatacccagcatcacttctgccaagcgaaattttaataaggatgataattatgatgagatcaacatcatcatcctctagcatttattgaggctcctctagcttactaagtaccagggattgtggtaagagttctataagaattcttgggccaggtgtggtggctcacacctgtaatcccagcactttgggagaccaaggcaggtggatcacctgaggtcaggagttcaggataagcctggctaatatggtgaaactccatctctactaaatacacaaaattagctgggcatggtgacgcacacctgtaatcccagctactcaggaggctgaggcagaagaatcacttgaactcgggaggcggagatttcagtgagccaggatcgtgccactgcactccagcctgagcgacagagggagattctgtctcaaaaaaaaaaaaattgttttttggtcttcataatattataaggtaagtaataagataaataataggtcgggtgcagtgactcatgcctgtaatcccagcactttgggaggtcaaggcaggtggatcacctgaggtcaggagtttgagaccaggctggccaacatggctaaaccccatctctactaaaaatacaaaaaaattagccggacatggtggcaggtgcctgtaatcccagctactcaggaggctgaggcaggagaatcacttgatcccgggcagcggaggttgcagtgagccaagattgtgccactgcactccagcctgagtgacaaagcaagactccgtctcaataaaaataaataaataaataaaatcctggtttcagtgaagaaactgaggctacaaaaagtaaaggaggctatttaacatgcttggagtcatgcagctaggaaggtgaaccttggattccaagctcaagtggctggatgccagcggcacacttacagttcttatcatggcagccttttgctctagatggcatggagaaggggtatgaaagaaggtggctgaaaataagattgctggagccaactcatggaaggtccaggatgctgcctagaacaggctgcattctggagatggtctgtgcgactatgtagcagcaggagagctggtaaacacagcttaggagctgtagaggtctgagcattatctatgccttgggaagatgcctagggagcagaggggagagggctcatccgggaggcagagcctgaggcagggatcacaattaggttgttagccgactaggtgagtgataaaaggccagaattagaacagtcatatctatactgaatagaggtggctgggtaatggatgcaacagagaccaacaggatttggctgctgaatatagggcaaaaagagtgggtaagctcaaagaaaggatccaagtttttgctgtgtaataggaacaaagtgttggaaagacgaataatgacacattcagaaggcagtggaagggtgagttaagagggatgagagacacagatgagggcatcactccacatatataactgaaggcaggggtttagataaggtgggaggatgaagaagaaaaatggaaagtggcgagagaccatgaagtgatgaaaaacctctgctatacaccggtggtacagcaatccaggcacaagagttaagaacagggcttccagaagtgagaaggcgaaaggaccaacaatgtctactgacacagggaggcaaagtccagcacatggggtgacctaggattggaacgagaatgctggggaatgagagagctgtgtagtctacttgcaggggaagggaaagtgagaaaatgacagtagtttatgagagcaatcaagagacaatgacaattcatttagggtaattaaggagaaaatatctagggggaagagagtgaaaagataaaactactagggataattatgctgtgcttacgcataacagtacaagttctgaatggaggagtgaaaggtagaacatgaagagtttgcatttgctttagtgacatacagagttgggggataaatttgttacagagcagaaactgacaaatcatagttgtccttactatttatgctttggagatttaaaaaaatcaaacagaatcgaatttggcacaagaacaactaaagttctgatgcataaaccacatcagcaacaaaagaccccttcagaatcaatagtaaaataatattctggctctccataggaagttatgattaagttactgtgatctgtaacacagaagagaagatgaagcagctgatgaccacagaggtgagttcataggctcacacattctgttcctcaactcaaaacaggttagaaggtacagcaggtggccatgtgtttaaacagggcttagggctgcacatctgcactgggctgcatacctgcacctggctgcaggggacccagagctgcaggcagcaccacagcgggttctctattaagagtcactgtgtgcacccacgactgtagaagataaattactaagttcagtgccatgtgtactctcacccaggctattatcaggaactgaggaacattttattgcccactctattagtattgaatactagcaccagtgtaaacaaactttttgtagcatttttcaaaaggggacccgacattcaaaaacattatatatctttattagaggagaacaatagaactggtacaccaaaagaaatcttacatatttttattcttttacaagtggcattaataaagaataacttaacatgaaatatataggatcaaaatgaagaaaaaatgtattgttttaaaggcacataaacatttgaatgaaagagaaataagtatcattagattcaatgttgcaaatacgtcacttgggctataaatttaaaatgcaaattttcctaaaaatgattataacagtcaaatattataactttttcctaagttaatctaaattcaaagcaatcctcctaaacaaaaccccaacagggtttcctgaagatgtctgaagacaggaatattctgaataaaaaatcgtgtagaggatcttatatcagtacacatttacacacattttataaagtgtcagaaatttttaaagtttagcacaagactagataaatggaaagatccaaatacgtagagtcacagagtcactgagtgtcttttttttttttttttttttaagacagagtctcactctcttacccaggctggagtgtagtgacatgatcttggctcactgcaaactccatctcccaggttcaagcgattctcaggcctcagtctcccaagtagctgggactacaggtgcgtgccacgacatctggctaatttttgtatttttagcagagacagggtttcactaagttggccaggatggtcttgaactcctgacctcaggtgatctgcctgcctcagccccccagagtgctgggattacaggcgtgagccactgcatccggccgagtatcttaaaaaggtagataaaatgtgctactttgcacacagtcaatggtagagtggactccttctacttgtagctaggagtccctctgaccaactcacatatctggtaacatcctaatgagtaatgcgatggtttactcatctttttcttttaaaagaggatgacgagtaggctggttttgatacatttcagcatctttttcttttttttttttttaagacagagtctctctctgtcacccaggctggagtgcagtggcacaatcttggctcaatgtaacctccgcctcctgggttcaagtgattctcgtgcctcagcctcctgctgtagctgggattacaggtgtacgccaccatacctggctagtttttttgtaattttagtagagataggcttcgccatgttgcccaggctggtctcaaactcctggcctcaagtgatccacccaccttggcctcccaaagtgctggggtgacaggtgtgagccactgtaccaggcccagcttctaccaattcttgcttcccagaggtctcatctttttctctttattgagagtacatagttaatcaagaggtcctggatgctggaggaatttgagtctgaaagtacacttgcggagggaggcccaaatttctgcaaaaattcagtggctggtatgagacttctctcttaccagttgtgtaaggattttttttcaaaggctccatttccaaactgtgattcattatgtatgaaggatcttctagcagagggaaagatatcccagtagtgaaccccaattattttttcctccccagagtgtttttcgtcctccttcttttctttggttttcctatgcagtagattattcctatcgttctgccctttataggacctgaaggctgtggctctgcccacagtgatctctgcactgattatttccagtcagccctctaacaatgtacacttcacccatgtctgccctctagatccctttctggaaggatgtgattttccagctactaagtgggagcagtcatcttgagacacttttcaagaacaaattacccagcagtgtgaccagaaagaagagatagctgtaactacttgaataactacggccctgcaaactctctcttctcccctcctctccttcctggagaagcaagagccagacacgtgtcaagcacttctgatgtaggaggcactgtgctaaactcttcacagacatcatctccttcaatcccccaatcatgctgacacaagctatattattcccatctttctagagatgagatggaggcagagacttctcttcaaggtagtaaaagaatgtgaacgcgacttgcccaatttctaacccacgctcagaaccattacgcctagttgtctcttgtgaaaaagcagattcaatacaacaattcattttcagttttttctttcctgtttgaacggagtagctgcctgaatttttggttaatctgatcatatggactagaattcctgtgactttaagagcttctaagagataaagataaaccaatggattcagtgacattaaaatacatcaagtaatatggaagagatgtttttgtaggtacaatataactgattttcatcagatatatcaaatttttctttgtaggttaatcaataatgagaaagccaggctacttggcagtaaaatccccaaatctgaatccttgagaaatattttatttatttatttattttggagacagagtcttgttctgtcgcccaggctggagtgcagtagtgcaaactcagctcactgtaaccttcgcctcccaggttcaagagattctcgtgcctcagcctcccaagtacttgggactacaggcgctcgccaccatgcccagccaattttttgagacagaatctccgtctgtcgcccaggctggagtgcagtggcatgatcttagctcactgcaagctctgcctcccaggttcacagcattctcctgcctcagcctcccaagtagctgggaatacaggcacccgtcaccgcgcctggctaattttttgtgtttttagtagagacggggtttcactgtgttagccacgatggtctcaatctcctaacctcatgacctgcccgcctcagcctcccaaatttttgtatttttagtagagacagtgtttcaccatgttggccaggctggtttcaaattcctgacctcaagtgatccacctgcctcggcctaccaaagtgctgggattacaggcatgatacaccatgcccagccgtgagaaatattttaggctcaaaaatatataactagtgacagttttaattttcttcaaatgggcttgcaaaataattatactgatgtaggttttgtctaaatatagcatagtcatttcaagataggagcaatgggtgcttcacctatctaccaatacaatcttaagttcacatctccatatgacagttttggctgctgtaatttgtatcggaagtccatgatcttcataaattcacctttgcatccaggagtgctgagagcaaccagaaagggcaataggactgtgactacaaccatgtcagcatgaagtccaagcgccaagcttctcaaacgcacagcattctactgatacgaagcatcattatttccaaatgctctgtttttttttcatgtgaaatggtcctcacggctcacagtaaaattataggttttttcttctaataccgccttctctgaaatgggctagtctgcaaaaaaaccaaactgtggttcctatcactgcgtctttcactcagtgtctacatgcttctataagcttgatttcttcttctcctccttacggttttgccacccgaatccctcttgccatgttacataatgacttcattgttgacacttctggtttggcacagggaagtgatatagctatttattttttaaaaacagatttttaagggctgggtgccgtggctcacacctgtaatcccagcactttgggaggctgaggcaagtggatcacttgaggtcaggaaatggagaccagcctggctgacacggcaaaatcctctctctactaaaaatacaaaaattatctgggcatggtggtgcgtgcctgtagtcttggccacttgggaggctgaggcagaattgcttgaacccaggaggcggaggttacagtgagccaagattacaccactgcactccagcctgggcgacagaacaagcctctatcttggaaaacaaacaaacaaacaaacaaacaaacagaattttaagaaatcaaatattttagaaaggcaacacaatccagagttctaacgtacagccccattttctctaagtactccaagaacaatggccttcactaaaatcataatatactttaggtccaacagttgtggacaagtaggtttaacagttacatgtgccttaaaactgactcaccaaggctgtctgctcattttcacaatgataggaaatatcagtagcctaaatacattatctaaaggataagggttcaggagctccagttcatatttccccatgatccatttcctttcatttgtatcaacaaaacaaggctttctccaatgcttctttattaaatgaggtagtattcctgaacattttcttgagacttcaggagtcaagtcaaaagaactcattagataaaaatacaagccttcttacgcctcccaacccccaatcattctagtcaacagtcttgagaatattcagagactattaatagtcttgcattaaaacaaattaaacccatcatcagtctgctgtccacagaaaacatggcagtatattttttaatatagcgcaatttcaactatattttaaactaaaagcaataaatataactgtaatttaatcaccctcctttaatttgaattcacatggtagatacttatagctacttaaaaaattaagaggcaaaatgtatatgaagaatatgtatcttgatattttaattatgctcaattgaatgtacttagatttaaagtgcttttcacaaatgacatgtgctaagaatatctaattgcacactgacattctaaaatgcgtgcttacacgtgtcaaaaatagattaatataaagttatagaatagacttttacttaaacccaaatacattattttgattatctggacacaaacacaattgtaactacaaacaagatatatagtaataaatgtctagtgatttatgtttcattaagacgaatacacaagtgatgacagtgtttgacatttgaataaattagaaaataaagacttgtaaaggaatctaaggttcaacatattttccatttactttcttactaactcaatgttaaatagagacatgaaaataatttgtatgtaaccaactattattgtatgcagagctcacaggtaaaaaagagatattcagcaaatagcagtggatggaataaattaaaacacattgccaaattgcagtcaagtgctgttcaaaactgttcacaagtgctgaagacggcattcagcaacctcacaaagaagctggcaaagatgaggtggcatgaggtcggaaggccactcaccctgtcgagctctgaagggaagtgtgttgggctcactgccttcacaagatacatcatcaccctcctgcaatcagaaacctgagtcctcacaaactgaaagaaagaccttttcttaaaccctagcattagggctgaattgcgtctctccaaaatttgtatactgaagtcctaactctcaggacctcagaatgtgaccggatttggacttacggccttttaagaggtaattaagaagaaatgaagtcaaatggatgggccctaatccaatatgactggtgcccttataattagagattaagacacagacgacacatggactgaggggtgaccacgtgaggacacagtgagaaggcggccatctgcaagaaaagaagagaggcctcagaagaaaccaaaactgccaacaccttaacctcggacttccagtctctgttgtttaagcctcccgctctgtggtatgaggcattttgttatggcagcctgaccaaacgaatacactaagttagactgtctgaccaaatgcacatctctaaacataaagcaatatagaatttttttttcttttgatttggtatgaaaataaaactcttaagtgaaaaatgtgttactagattattaacaatattgaaaagataataaaataaattcttactctaattggattctgagaaagataccaaactgaaatatcctagtcctaatttcttaaccacacggtaaggcagaaaaaggctattctgtttacatgttttacaaatattaagtttcatgttttcagcttcatggggttttaatgggcccatagaagcctggccaagaaaccaaagtggaatccatttgactgacattaaaaagcaattaacttacaggcctgtcaaatatgttaacatttggggtctgcctgttatacatgtgtattttgactactactaccagaatagtttaatgatttacagaccttcaatgtctaaagtaccttaactgtatgaaagctatggcccagtctttcttcagattttcctatcgtaacaaactcctccctatttactagaaatccagaaagatggcccaatatttgaactgtgttgagtcaaacaactctgagactttcccagagaaggtaaagggagaaaaacagaaaggaagtatctggctggcccagtgtctagcatgaaagttggactttcctctaataagatgacatttctgagccactgaaggcagcccttagccagggaggctatccttaactgtcttagtctgttcgggcttctgtaacaaagtatcatagactacgtggcttataaacaacataaattcatttctcagagttctggaggctcgaaatctgagatcacagtgccggcacagttggaatctggtgagcactgcttcctggctcacagatgctgtcttctcactgtgtcctcacatggaggaaggagtggggacctccctgggatcccttttataagggcactaatctcaaactgtaggctccaccctcatgacctaatcacccccaaaggtcccactcttctaataccaccacactgggagttaggtttaaacatagcaattgtggggaaaataaacattcaatctatagcacccatgagcccttagtaccatcagatatttcttttaattttgccctcagtccaagttgaaatcatctggagaaagagcctctcattggagtaggcaagcagtggaactctattcaagaccaatgccttagtcccattgcctggaggactttttgagaaaaccgatggagctgcctcttggcttttcagaaatctgccaatttagatagtgccatgaggttagcatttttttttttttttttggctattaattggctcctccttttttaaagctcctcttttctatgattccttcatgactctgacataatttcatgttagtcattcaataaagtcttttctacttaaaatacaagccataataaataagctataccaaatgctccaagttgtttatcttcatcctgttcttaagattctgaatatatttggggattatttatttgtcattcttagaaatgaagtcaaataaaataaataggagccttataaaggttggttctattactgggtgatcatggaatactttcttgtgaaatatcctggatatgcagacacctagccatggttacagctattccctcaattcctgcacccctactctcccactaatttttggagttaattcctctttgctggccatcagtctctaaatgaatagtaacatggtatacagagtcactacccttcctttccaaatctatgacccacaccttgtagtcaagcatttattcattcaacagatttttttttaagtttcttccatatgtcagacacaatgctagacacacagctgtaacagtgcaacacaggccctgtcatccatatttatagatgtctcagttcagccatttactcaaggtctgtgagatgcaattagttgtcagcacaaagttatgaaggaagatctcctcaagtggcaaagcagtgaccatggttgacaaagacagcaggtcatataataccagacacagtctccaaccctccaagtcaagaggagatggaaggcagagataaagtgcaagtacaaatcaagaaaatctttaatatggtcttacattttggcggagtaggcaaaaagttctcccagggaatattccaaacaataacaataataacatttgaaaacaatataatcactagattttcactgaactacaaaagactgtaaagatacaagcattaaaaaaattaacattattgctatagcatcactataatgcataatgtatcttgattaattcacatgtcacacaagagtgacttcataaaaactcaacctaatgattaagcctcacatcatcttatatttataagtaagatatgtgcagagacttgcatagtgaaataaaaattctaccttaagaaaaccacactatgaggctacgtatccacaggaaatcctgggaagaaaaagatcgcgaagtaagacttaaatccacttcaggcaatctgtctcatcagctctgattgtcagagtatatgtattcattatatgaggaaattttcttcctggtttgatatgagtgagtatgaaatcttaagggatttcaagttcaatcataaggaatggtgactttgagtatattttatgaccaaagtatacacaatactattcagggcaaacttacagaattcagagctaaaaacaaaacagtacaagaaaggtttgaagacacttacaggtagttgaaacaaatggaaatgttaagcaaagtcattaatatctgggtggcgccatgactcaaggctgccatatgtatggcctggcgcacaaagatgaggtttgccaatcagatttcctctctcaataattaaatggaaaacaaaacaaaactgaacaacttaagctaattagctggggctggggcaagggatgaaaagaggctgtctcctactgtagagaaaggctaggtggctggcaagaacatgaagggaattcttgagaaagtcaacaccaattcttcaggaagagaagaagttatggattagaatagtcaaaagatgtgcagagggatgcaaagtcactgtgagagagacaaaggccaagtagagaaaatggagagagtagccagttcctaatgctgcctcaattctcaagagccttcagtttcatttaatgggtacccttaaagtaaaccttcatttgattaactccaactttggtgagtttctgccccctgctaccagaagcaatctagagaatgaatgggttctaggatcagcaacagaccctcagagaaggcatgagatgggctatgaaaccttcacaaggtgaagggcaatgaagatgttcccagcccacaacacagcttactgaatcctccagtggcagttaaaacatcctttgctattattcctattacgatgtagggtctaatttctctcctgttgagtctgggccagcctaactggcttgtctgaccatcagaatgcactggcagtgaccttcaaggtcaggtcataagaagtcttgtttctgcccaggactcttaagatgcctgctcttgggaggctccctctcagaatcaaattgtcaatgtttgaaaagaccaagctacacagagaagtcaagcaggtgctctggagcacagccccagctgttcagttacaagagtgagccaccttggatatctatcccggttgacccttcagatgagtctggccccagctgccactagcccataaccatataaggatcccaagtacaaccctcccaggctgagccccgtcaatccatagaaccacaagagagaataataataagtatctatttgaagccactaaattttcagattatttgttatgcagcaatagataatcagaacacttctcctcctcaatgatggagaaacactgagatcattcctgttaggaggaaagccttggaactgggattggcatgcactgtggacacaggatgaaattaaagtcatttttagaataaagatgctatgttacccagcagaggaaatcaatcagtagagaaatggcaaataagcaggttcacaaagaagaccagagatttcaggagcacctgaggtagctgaggtcctcaacagccatatccaaactccaatacacctattccattccccttcacccaaaaagccaaactaaaacattcattttcacaacatcctctctctctctccatatatatatatattagaagttaaaaagtagacaccagaagaggaggaagactagtacttaagtcatgatttaattctttcatacatattatctcatttaatttttcccacaatcaggcaaggtaactgtggtgcattaaagatggctgcaacatcaatgccacatctcccattcagaggtagattattttccctggcactgaatccggctggcctataacctgttttaacaaacacactgtggctaaattaatgttgcataacctcaaaaactgggcctgagatttttctcagcttcttattctgctctcagaactcaccttcttaagtctgacactatagtgtgaggaagctcacgcagatatgccatgtggagaacctgttcccccagccatggctccagctgagctccaagctgattgccatttgtgtgaggacattttggaccttctagctgcctcaccactccagctgaaaccatgggaaagagacagaaaccacggaaaggaggcagcattaatgaaaaagaacagattattgttttaaaccactaagttttggaggggtttgttacacagcaatagataactgaaagagaaagttgctatctaaattttatagacaagaaagctgcaactcagagaagtcaactaagttgtctaatccttgattcacatctggcaggtgaaggccttgggaccccaaaccgactaaaagcccatgttctttacaggaaactggactgcctcttgttagatgtgattatttttactacaaatggctatgattttcaaaaggattaactttacacacacacacacacacacacacacacacacacaaaagaagcagcagcatccctgttggcaattctcaaaaattagaatggcaaggttttaaaaggaacactttcactttgtaaaatgatctccatctatatgctttctattcttggtgatttgggaattatcattaagtatggcttggagagacaggtgataagttttattgttaatgatgggaaggggtttgactaacattaaagaaaagatataaatgagtccattatcagatttgtcgttgattggctgtgaagattgacaagatcacttttgagtgattttagctttaaaattctttcatttaaccaatatttacaaagagtctacaggttaccatgcaatgcctgcagtcctcaggatacatcaatgaataagaagatccctgcttttgcagaacttgtactctaccatgaaggagacagaaaataaacaaaaatcatgaaaaataagtaagttatacagaatgtttgaaggtggtaagaaccatggcagcagaagaagaagggagggatgatgggaaggcaggctgataggtagatagggagcgtatgctggcagtggggagggttaacatttttaaactaagtatcatgtataagtttaaatcataagactgaagaaatgactgttgtctagggagaaaccccaagtaaccaaaaacttggttaaatgaatacactgttccaaccataagtccatctagaaacccacacatctgtaacagacatacgcagtatctgccgcattccaacactttgaatgtaatactcccatttactattattttctgataagcaaagcacatgagttgcactaatgggaaaaaatgcaaaggcatcaatctgggaatcatatgaggtgttcctagagcactgggttaggatgaggcattcaaaaacaaacatttatactgcttaggatattcacaggtaataaaaagtagagagacatgcttagaatgaaaaacaccactgtcaggacagagttttctcttgggagacagaggtaagggaatgaaaagcaatttggacaggtacattaagggcctccaactgcactgtcaagtttgtcaccaatctaagtggtaggcacacctgtgtctgtattgttgtgtttttcaaaatttttcaaaatataaattaactgcaactgaatgtaatgtatgagatgagtaataaaaccttgccttaaaaacagtatttgatacgtggctggacaaactggcataaacacatcatgcatatgggaatcaccattatggtaggaatcaggcaggaaactgcattagggtcctacttatttataggggagtgtaattaagattactcttcattccatgttttcccaacagtgttagtctcaccagtcccttttagaaccagtgacacaagcatataaactgtttttccaactcaaaatgcagtcaaaatgaatataaacttctataaacaccaattatatttacaacatgcacactcacgcacacacatgtgtgcatcacaatgaaaaaataccctggacccattatcaaaggaccatagtttaaaaaacatgttaatttgtctttccaaaaattactacacaatactattactttctcttgttatataaacagtttttactaaatatggctttataagacagatgttcatactttcatgactttctttcttagtaatattagatttattttcaggccaaataaattaatcatcatatttatatttcttccttgaaactagtcattgcaccacttgtatttcttatctggtgacttttttttaaagatcaaaggatcaaaagctaaagatcccaggctcctcaagatttcaacctagatgcatattacactagatatataaaagtcatacacttactttgttgaatgaagcactgcagcctacagatcatattgcattacatacattattttttatttttttcttaaagtaacagcaaaaaagcaataaaaacaatatattcagaggtaatacatcaattttcagaatcattgggaacctaactggaagtggctagtggtaacagaacctctgtcttctgacacacacggtcactaacacagattttcaatcacatccctctaaaggtgccaagtttttgatccaagaagggaaaagatggaaaaaaacagaaggtatacatatatatatatacctcatgcagggaagactgaaggtccaagtctccatcagaactcccacaactacaaccctaatttagaatgcagaaacccaagttagggagaaaacacaaaccacaaaggattctttcagatttagagtttgtaaaccccagtctcagcatcgagttttgtcttaaaacatgctgaatatatcactactgttaaagtgtgaatctataaaaatgctcagaaaactgaagtcaatttttaacagtgctctaaactaaaactaatctcaaatgcaaaaaatgagtttaaaaataaagttagacgtgaaagttagcccttttacatatgtcagtgaaacagaagattattttttcatctcttcagttacaggctttattatatcaaaaataataaataagaaatgggataaactttattcctttttagtgacaatcattttttcccctccaaatttactaacactttcattctaaaaaaatatatacaataaaacaggctgtttagctaaacattatgaagttatgagacaaagatctccctacatactttcctcatttttgcagaaaacagatcataaaacagaataagccttgttcaaagaaatgagcagctttggttacaagtgcaaaagtcagccatgtgtactaattctcagtaatcatgaagcaaggtgagctccccagggacttaaaagtcaacacctagcaatgcttggatgaactaagatgaggaaccgctcatgtgacacaaccttacaaaaccctttgtattcccaataggacagatgaggctgtggaactcacaacaaccctctaaggtgtgtgactgactccaattatagagaagactttgccaaagcctgcaaagaaagatgctgctattacttaaaaaatgcatggctgggcggggtggccccatgcctgtaatcccagcattttgggaggccaaggcaggcggatcacgaggtcaggagattgagaccatcctggccaacatggtgaaacctagtctctactaaaaatgcaaaaaagttagctggacatggtggtgtgtgcctgtagtcccagctactcgggaggctgaggcaggagaatcgcttgaacccgggaggtggaggctgcagtgagccaagatcccgccactgcactccagcctggtgacagagcgaaactctgtctgaaaaaaaaaaaaaaaaaaaaaaaaaaaaaaagcacgtgtgcacacacacaaacacacacacagaaaatggaaccatccattcatctactcagagatctaaagggacctgggttgtctgctacctacaggattgcttaactgaaaataaactcttacttcttaaagtaatgattgggggggaaaaaggcaagggagaagacttgaaaagctaaggaccactgtctacctctttgagatgaaggatggcaaacctcatttcacagatattttaagtagctgtaaagcctaagtggctccaattttaagcctgtgtttagatcaggtttgaaaagggctacatctctttacataactaggcaccacttctgatgccaatgtgctttgtgtttgaaatgggcggccgcatatgcaaaaacaagaccacctacagatggcacctagaaaatacgtgccacaaccaatctccttggcacccagaggtatgtgcaggcaaaatgctttcattaaaaagaaaataaacctctgggcaccatgccatgatgattgccaacatcttgagtagtatcacataattaattttacattttaattcttacagaaatctataatcatatcttttcagaaagtttaaaatgtaacttaaaaaaacaacaaccccacctgacctaccaaaaaaccctgctatatcctgggccctgcaacaacctgaaggactaggctaggcacagcctatggatatacctactcaaaaattagaaaacctacttactcaaatggaaactacagagttgttttaaatggagagtagttatggggaagagcaacttctaaaattctctttgattattattgtgtgccctttatatttaggacattaaaggctcctttttttccatcctgaacgctcctaaagttacagaacaaggggatcctgcctgcccatctccaacaggtcagtgatcaaacagagagtcaggcagtagccaaattccatccatctctaaagaataccaggagctaggacttcttaggtcctgctacatttaagaaaccatcattcaccattagataggacaataagccctttccacacaaacattgcccaacgtctacattcaaggatcttcaagaaaaaaattactttaggaatactacttcctgcccagagtaagccaatttaaaaaagtgacttcatcttttttataagaaataggttcggataaaaaaaaccaatattgtatcgcctgagtgatcaaagcctgttatttaaccaatcttatctttaaataacactagtctttgtataagagtttaatttacttaaagtatttacattcgcatgaacaaaccagtacgagataaaacgagacacaatgttttgctgagcttcagaacaagatgcaagttgttcatccatataaggaaacaatcattccaagcatttttgacaatgcagcgcacactcagccagttatttcccagcattgttctcccaaaagcagtggaagcttgaacagttctgccacttgcaaggcaaagccaagcagagagctacggttgctgacttcagactacaagttttagtgcctgacccagcagagggtgccatgaggaaagaatgtactaaaaattaactttagaaaaggttagcaaagatttttcaaaggccaaacacttctgccacaaatgacttccattgcagaacaaaccataagcaatgacgaatttaacaggcatgacttaacaggcagtaaggtcagaaacatttacccttccacctctggaatggttcgcctgtctaggaaaagccgaggtgccctagtagactctgcccttgtgcaggatctgtggttaaacagaagccttagtccacacctgttgaccatggtagtgatatatatgtgaaacaagtcttttcaatgaagagagcttcaaaaggtacttacgcagcctccagcaagaatttctgctgcaagtgggaccgaaccatctttgtgcataaatttatccctcacaaaatcgttcaccttgaagaaaaatatttatagaagctgatgaaaaatataaagaaagtcattaaacacttataaatatgcatctgtcaatatatgctatttttttctatcagtctattggagtaatcataaattgcacaatttaacagatcttaaaatagtttgagaagtactcttaatagtataatagttttaaaaaatgaaaaatatatatgcatcactgatgtttcaggagaaaagttaaaagataaatgaaagccaaaaatatgttctgcaattagaatagcttaagaagggagacacactgacaatagtgacaaaataaaaacatacatcttacaacttaaaactgttttataaggcttgattaaaaatcactttcaagtcttctaacaagaattaatctaaaacagtactcatcatggagataaatttggctgagcagactttttcagcttagaagaaattcaatatctaaaaattcctcaaggattctcaaagaacataaattacattaattaattaatataatattctcaaaatggtatgtagtacaagaaattttaagaaacagtcatatctttttggcagacataggccagagaagattagctatctcaaggtcacataacaaaatggtaaaagaagaatttcaggctccaaagctacgcagcccaacctaaagctagagttttactttctggggctttgtggccttagtgatgcaaatatttgtatattccacaaacgcttaaactgaatatcaaccatctgtcaaatgtgagccaagcactgggcaaataatctgataaaggatcaacttcaactagaacccagatccctgcacatttggctttatagaacacaccctaaccatgaatcctataaaaacagcaggtgtaatagaaagacatgctctggagtcagacaagtgtgattttaaattctagttctcccactcatgatttgtgtgaacacaggtatgctacttaagcccgataggcctcagtttccttatccgtaaactgtggatcatgctttgcttgagattaaaccagtaaaacgtaatatacgtcatgtgcctaatatggtagatactgaagggaatttagctgctactgctgtgatgacaacaatgatggcagcaaccaccaaaagtcctcaagtttattatcacatttttggatgtccactgctaaatggagaataatgaaaaaatgtgtgtggtgagttcccctgctttcaaattagctagcacctctgagaaaacaaacctgctgtttcctataagaatacctgctagattcttgagtatgtacaaaatcccttaataagaagcaccaactcaaaagacttactgtaagttttatggccttctctggggcaactcccaataactgtggcaacagacctaaaaatcaacaaaaagtagaagtatattaaataaattagcattaactaaacaaatcaacagttctacagaggggattaccacttaaaaactgcttaatctctgctgcaattttctgctattacccttaatgagaatatttgaaatggaatgtttaagtactaacttctaacagccgcatcagtcccaagtacattccatctcacattctggatcgtttgcacattgggtaaatcaacagtattagtgatataggaaatctcattattcccccaaagtctgctccttcccttctgccttctaaatcagtggaccacttgattttctaaaacaaggaccaattttggggaaggcagttagaacatttagtggagctacgtatctgaactaaaaaatgtcatcattttcatttgttcttcttaaagaaaaaaaaattaaatcacagttgttttttcttggaaacacacaccaagctaaccctgaaggtaggagcatgttgcaccctgtgtcatactgagagaggttcatggtaatattcttcattggaagtacaattttctaatttatctatgtaagaaagtccactcacagcctcttctgagggaccagccctgcccacactctcttcctaaaggagcagcctgagaggtcactagcttgaatgccatatgtatccaacctataagtgtgttttattgagtaacaaaaagtttcaaacataatctgacctccttgtaagaaagatcaatgaggccaggcacggtggcttatgcctgtaatcccaacactttgggaggctgaggagggtggatcatctgaggtcaggagttcgagaccagcctgaccaacaaggtgaaaccctgtctctactaaaaatacaaaaattagctgggtgtggtggcaggcacctgtagtcccagctagttgggaggccaagacaggagaattgcttgaacccaggaggtggaggttgcagtgagccgagattgcaccactgcactccagcccggcaatggagcgagactctgcctcaaaaaaaaaaaaagatcaatgaacacactgacctaacagtcagttcatgggctcagttctgaccgaactctgactgaccccgggcctctttctgacatcccagccatctgctctattgcatgaggctccatccttcagacagaaaccatgcaaggtggtgcccaccctgctttgaggcccgtacctcaatgaggacaagcgccagtttgtatttttttttttgacggagtctcactctgtcgcccaggctacagtgcagtggcgcgatctcggctcactgccagctccgcctcttgggttcatgccattctcctgcctcagcctcccgagtagctgggactataggcgcctgccaccacgcccggctaattttttgtatttttagtagagatggggtttcaccatgttagccagcatggtctccatctcctgacctcatgatccgcctgccttggccttccaaagtgtcgggattacaggcgtgagccacagcgcccggcctccagtttctatttttattgctttactgatatcgtcacaattgataaaattttttctttgctcatagccttataaagggggaaaactaaaaagatgaatacagcttcatgttttcatggaaaaatgggaggaagtccttcattgtggaattaaacaaggataaggatggtgatgttaatgaaaattttctttaaaagtgcatcacgtttattacgtgccaggtaccattttacaaaatgtattaactcatttagtcttcataaccactctacagagaggaaaccaaggcatagagagataaagtaatttcttccaagttacctagctgttaagtggtgagactgggatacaagctttagccatcttactcaaaaaatctgtatctttatatacaactcaactctgtgttaatgtgcaaatgtgtacctgcatctcacacacccagctgcatttgttcacttatataacctgcctagatcctatcagcatttgagtttgcaacgcttctttttgttttttctcattttttatttttaacaaagagataagccctcactatgttgcccagaccagtctcagattcctggcctcaagcaatcctcctgcctaggctttccaaaatgttgggattgcaggtgtgagccatctcacctgtcctgagtttgcagcccttcactaagcaactataacatctaagcctgcttcatccccagggccacagctgactggacaatgtaaaacacctaaaagacacgcaaatcaagagttcagcaacctgagcctgctaccaaaaatagagctggccaattaggatgccttctccaggaggatgactgacagtctttagagaagaggggacaagttagcacagaagcaacaagatgaaaagatgtcatgggtggagcaaggaaagcagccaattggaagtcacgtgtgtgctaatatcacaaggaagcagaaaccatgaataagcagaggaagtgcattggtggacagatgagaatgtggagcaaaaggaatagagattaaaaagagaatgcacatagcccatgaaaggcacacaggtgggagcgcctgtccccatcacctttgggtcccactgaggccagcctccagtgcagctcctgctcttggatctgagatttctaccttctttctctcttgtgtgaatgtttatcaaaagcccccctaagctcttgctagcttgagtggggctgtgctctttagaatttaaatgagctgaggcagcatatgagaaaaaacgggaatatgcaaccatttgggcaaagcaagcattcttatccaaagcaagcattctctcctaaactatactcatgacactcactcactgatctttcagtaagatatctataataggagaaggcttggttattacctaataaaagtacaacattaatttctactagtaatatgtgggcatacgcctgtttaaactacctcttcacaattgaaattttcatctttctccctgtattcacatcaagtaacaaaatgcttagttaaacatttacttgctagatgtatttttctcatcattaaattgtagaccaaaattgtggatgggttgaaagcactgtgatttaaatgatgaactcttgtctccataactatcctgtgacagtctttttaaatgactaataaaaaaacaggccacagagcctaatgactactgtgttagatacaatcacttcagccagcctttcaaactactgaaatttatccttctcaccataaatttagtaatgcattgtgaacggcaaaaaacagaagggaaaaccccgtatttaagactacaaagaaggcaacaagtagctatttgttcagcaaacatttaccaaatgccttctctgtctgcctggtactgagaggaactgggatgaacacagtgagactggtgcctccccgctaagaagctcagagtttagagggaaagggaacgctagttgtctccacctgccagatgggggacaaaccacctaacaacagcaggtgctgcataccagaccccaggggcatcacaggactatgagaacccagtggagagaaccagttcttctgcctgcaggaggggaaaaaacatcaaagaagaggagatatttgccctgggacttcaagggtgagcagaggttccccggaaagatgagacaatgagcagaatggagggcaaggtgacccaggcagaggaaacagttggtgtgcaaaggcaccaacatcttaaggctatggcatggagtcagggcactggaggctgtgcttggatcacagaagaccagataataaataacaatattattaatagtagtgataatgacaacagccaatatttggggagcactcgctatatccacatactacagtactgtgtgttttatgtgaatgaacacatttaatccacacaataccttacttaaacagtggcttttgttttatccacagcaactgaagaagaaactgaggccgactttaagggagctgcccatggtggctcagctgtttgatgggggaacggggttccacccaggctgtccgactccagcctgtgctcttacctggtacgctgcacaacttctctcccaggcccactaaggagcatgcaccaaattctgtagatgcatggggtggcttttagggtaaaaagtaaagttcaaaaagtaaaaagttctagaggcaggtgaaggatagtttgcaagagcagagacctgaggaagctagagaaactaggagtttaaggtaatatattagaggccccgagcttccttatattaaatgattaacttcaacttagaataaaaccaaagcacaaatccattcctaagacctaggccagatgctgccactcacggaagttgttgataagaaccattcttgtagtgactaccttgtctggttaaacaggaaaatgaaggtgactggattataatctgaggcccactacagatgtgggccttgaaaacatgagtcttgggtaaatggtctttgtaagaaggtcatgatctgtgaaacaatgaaaagtcaaagaggtgggaattccaaactccctccttgtaccttgacctcagagggaggagaggtagcacagcccagtaatgcctaaagcagagagtctaggtgaggcacttcatcacaaccacaattaagtctaaagtgcatatatatctgacatctgggtaattcagcagaaaaatcaggtttctaatataagatgtttctgttgggtcctggaaattcactttaaccatttgaaacagagaatggatgtgtgtgttgtttctaacttgtcaaaacagcagtccattttccaactgcctcaaaagaaatttattagtgtggttagttttccaatcttctccttttagttcagctccatcagcacatatggcaatgcttccttggcaactcgactctaccagaaggctgctaatgcgagaaaagatttacagggtacagtattaatgtagtattttgtcttcacatttcatgggttggagatataaatcacactatcccctctgaattcagtcccttgcgcaaaccaaggagctgaaggtgtggggaccaagcccagatcaggggtctccaactcaagcttcacaggacatccccaaaagaggttcctgggcccactgtgttcaactagagggctagcatgctattcttaagaacctgttagaaatataactggaatttcagggttggaagggattatgaaagaaactcaatattgctggcctaatttaaactaattttaggctatttccaacgggctggcagcaaaatgaacaatctagggcatgggctttggaggtggacagacctgggctagaatgctaggtctgtgcatctttcacactgagtgatcttgggtagtaattctttgaattctaggttccctcttggcaaaacaagggtgctacttactatctattggtttattttgataattatatgaataagtgtacaaagaaccagacactatttacctcatatgttatgtattccaaaagacataatgcttctttctacctatcttttcaatacatagccttgatttcttttgtttgcaagaggcaattcagcctgaatcatgttcacagtccaccattagctaaggagtatcatgctgtgcccatgacattatgcctatcttagaacagctgtccccaagcagtgagagcacatgtggtctggaagtgtccaggggccctgtatactttgggcaaggtaaagtagtggcacagacaaaacaacacatttcaactatgttattaagctgaaataaaatattatagttaaaaacttaaatgatccttaacctctgctgacaagcaacttttcacaatgtaatttctaccaggtgacaaaagagccaagtgattaggaacacgaggtctggagccaggctgctgagcttcaattctgactttgctatttgttagctgtgtaattgtggacaagttacctaatctctttgtatcttagtttccacatctgtagaatgggaataatcatgatgccattttcacggggtagtcgtgaagatgaaatgagttaacactcacaaaatcctcagaccagtaccaagtacagacagtaaagactacagaaatggatttttgttgttgttgttgatcttcatcatcactatcacttattcttcctcctcctccttcatggaaactggaatccagacaggctaagcagcttgtttcaagtcactaacttctgagcgactatgtagtagcactcaaagttgaattcaggcctgccagtactctcaaatcagggctctgtgctccttaattctctgcggtaccagttttctctaacagacttactgctccaagttcctcctctgccctggaaaggcatttcttcccaactagactgttctgaaacttttctctaggcctcagctcaggctgggtcagcaccctgccctgcctgacccttgtacacaacaaagggatggtgcccatgtagcaggcatccacatcatgcttcccccgtctctacagatggtgaatattagactccttaaaacctcgaaggcactgaatgtcagagccaagctgtaggttataacctggtgaaccagtgagagcaggaatatactgggaagaaggcgcagggtcaggagtgggttgaagccacgctgagcggctactgtaacccagagtggccagggtgccaaaggaccacgctgggcaacgctagcaggaccacagaggtggaggggctactaccaaggaagaaacttggtaactaaggcagtagttaccagttctatctcagcatagaactgagacaggggccagcccaaaccagagaaagacagctgagagcatctaatagagggcagaaggtattcagggcagagacgagcagtaaactttggaaggaaaaattaatccagaagacacccctattcctgtagctgaagccacagccagcacactgttgtgttatctagtttccacctggtagcaacccctccgatgtcaaattcttacccttctgacctcactattgaaaccagaacacttgtccctatcttccccgagaaacccctttgctttcaacatcagattaaccttcattctgcagctatcagcactttgtgtgccctgccttagagctttttattcctgctcctgttgccatgcccttctctcttcacttgctcaagcattctttcctccctcctcctcctcccatttgtctgtctgcttttgactcagattgcccctaggcatgaggcatttccaccttcccaactacactatcgcctttcaaagccttcattacaacccagttctgacaggctctttgggctgctaccccaaggtggctgtacagtggagctggggaaatagccagggacaaatgcagaaatgaagatttaaatgccagtttatctaggttaaattatttacactcaaaatttcaagcactgtctgttatcttagctatggctcaggatgcctttgggagacaaagtgttaaaacataaaataagtgattatgattatggtctggaaaaaaatcagttcctcaactcctctattctggggctttctagaagtaaagagaattggggaaaacgatcagatactcctgcagtttttcaccatagtacatgagaacgttcaggatcctggttatcttttcttctatctaaactatttccctcctactgaggtttaatctatctcccttgttttagtctcagcaacagtagctggttataaattatcatttttgaggtgtggaactaattcattcattaacctcttctctaggatacctacacgtctatctttttgtcatatttttccaattttctaaggtcatcagttgttactgtagcactctcaagtctctaacaattctctcacccaccttagatccagtgtgtgtcgcctcagtctcagattacaatgccctgtgctcactaaagttagctcactgtagatttctggagattggctaacccaacaaatgatctgttgaaatcttctgctcattcttatgtggcttcctataaccaaatacatgtcttctgatatttttatagcttaatgctctaaatgaaaacgtgcagaaattggccaagaaaataaagactcaaacctatccattttgcaatcattaaaagttttggtggacatggatggacatgagtgcagttcacagattaactatggtttgtttcaagatgcatgtgttcttaagtaatgcaaaacagtcatggaaatttcaatcattttattttggtgccagaattttaaagtttattttatccccatgaattatgcaagaatgaagaatctcactgtgattctaaagaatctggatactcccttttatagtaccatcaatgataagggacctggcttaaactagctgcctgccaaaacttccctctgcaatataaaagtatcaataactccctgagatatcaccacaacatcctctagatgtcaccttgagaacattccaggatggaagatgactgctttgcactacacagacaacttgaaatagaaatatttacaactctgcaagcttggatcaatgggctgattaaaaaatgtggttttttttttgccaatttcctcaaaggttaagcactgcttaaattaagtttaattcataaaatgatctaattactctttctgggagattttctttagggcttctcccatcaatagaaacaaaaattttcgtctaagaagtatttctgatagaccctgatttctatctctttttttttctaaattgagacagagtttcactcttgtctcccaggcaggaatgcagcggcacaatctcagatcactgcatcctcctgggttcaagcgattctcctgcctcagcctgtagctgcgattacaggcccgccattatgcccagccaatttttgtatttttagtagagacagagtttggccatgttggccaggctggtcttgaactcctgacctcaggtgatccacccgcctcggtctcccaaagtgctgggattacaggcataagccaccgtacccggccatatttctcttaatacatctttttccccaagattctcccaaaacattttccagtgtctaaggctgctcatctcatcacctgaaagatctgagagagaagactgcaacaaagtttaaaagcagaaattatttattcctggaacattaagagcatttaattatggatgattacccaatcaattgttgttctttaatacgccagatctatagcaggccaatgactgattcatttggttatgccagtcattcaaaccaaacaagttgtcaggtaattcattaaggatttcaaatacctgagcacattaaatcactctgaagactggggaggaaacagagaaagaattttaaaagtgacttcaggaagacctggattatctcaggtgtgatttcccttaatacagacaggcttggcctgggggttggattttcagaaataacaacaacaacaacaacaacaaactaggaaaatttgccattttcttgttaggaaaaaagtagtttgcactgtagagaaggtttgcagagccagactcatgggatttttaaggagctcttttccagcaactaaaacttacacaaaaataggagagaggctcctggaaataaagaaaacggagttataccaatacatggagagcaggaattaaccaactcacaacacctctcatgactctctgaggtatatttctattgaagagcactgctaggcactctctcatgactaccaagcaacttccacaactattctgatgcagccagctgcgggggaggcaaagaacaaaacttgtggtggagcactacaagagttcttttaaaataaccttcattctaatgccacagggaaaggcttttaaatgcaaaaacagcttctgatattcttgttataagaaaaagagatatttattaacctcataataagatcgcatgctacaaaaacaccttctttgaggccagatgccaacttttttcaaagtatacacaaaggtaattttaaagtaggagaaagatcttacaactgcaacattcccaaattatctcattcaggaaatatgagcaattacataggccttgatagagaaaaattacatgttgagcaaaattctgtaatactaaaaactatgctcaatatttaaaaacatgtatgaattaaagatgtactctgataccttctcaaatattgctaggtgaaagcattaatagcagcaatactatattttcctaatttaaacgtaacagttttcctctggaataatataattttaaaataaagttacattttatgagaaatgtacaaagaatcacatataggtatttcataatgtgactttgtacataaaggtgataatactgagtctcagaaatatgtcaggtcttttttacttatattgtaattttttaaattaacaacaataaccatgagttacctacattttcatctgatctctcttacccaataagcacttacaaatatgcagttatatacaattattaattattgatgatgtacaagaaactaaagagaactgatccctgaccaatcaagaataggaacaagtcattttcatggcaaagttatgtatcattattattttaacctgaactgtcagtcatcattttgctctcaagatgatccaaattacagaatgggactaaacaaaaattttacagtaaattttttgttttaaaatggtttaccagaaaagatatcaggaagaaatgaacacaggtgactcctagaactaatcttatattcacactctactcatcatcctgacagacagctctgtctcttgcccttaaggttggggcacccaaagataaatggccatttctaaaccaggaaaagggtgaagagctgccacttgggtgtttacagtgagcctctgtctgtacctaatatattgacttactactcctctgagaagttaaaagcagtcactctcatcttacagataaaagaactgaaacggcaagagtggaagcctctttgcatagcccacattagctcagcactcagtactcaggcacacttctagttgccaacagtacaggttgcaaaagggaaatatagacgtaaccaaaaatcagacctgccaggtatggtcaaagatcgagaaaaaaggactcaaaataaaaaatcaacttaagcaaattaaagacactgagcagtgttgggaagcattcttacaattctaaaggcatccttgacatttaatctaataccaagaaaagcccaaaaagtagtttatgaagcaatgctcagatgtctgcccagacttgagactcgagatttcccttccaaaaaccacccatatggacaggtaaggcggccaattttgcctgactcactgcagaataggaactgtgacattaaccttgtactacttggaagccatttcatttgcaaagttgttgccatcagggaagaaaagcatttcaaatggaaggcagtgaccctgaaagggtcatcatcaatcacctgaggtcaaagaccttccaaattgtaagaagaggcaggggataaggaaaagagggcagagcaaagatcaaaaggcctttgatgggggctacctacctacacaataggacctgcaaaatggaacttctctggagtttgagactttctggcttctaaggtgagaggtttcaagaaaggtttatcctttttgttttttttaactggggtaattaatttgaagactagagtcagcagatggcagaagaggcccagaggcacaggtttccatgtctgccagtttcaccgtccacctcagcagagtactaaatactgttttcttcatctagagagagcattagtaggggagaggagggaaaactctgccagctttgccgctgccaaattataaagcagctgagtttgaactgccttgtgatactgtattttaactgatgcagaaacactgtttccttctcgtagaaggcaatccccgaaagaacagttgagaagtctccttcggccaatgccagtggaaaagcagtcagggtctgtgggatcctttccatcagtgatgacatactctctgctactacttccattgcttaatgaaccttagatggttaaaggaaaaggtggagaaagaaggattacctgtttcaggctgtctcagtggggggaaaccttggctagaggggtgtgtgaatcaactccattgggttgagagtcagatgaagaaaaggggcaactttaattcaggatgaagcagcaaaagagagctctactgaacccttcgttatcttttttgtggtgtattccaggaaaatcatgaatcctgagtaggctttgtcctggtggcagaatacctttccctgttagctggagaatagagtacttcaaggatgcaaacaatgtgagcctttcaaaaattcacggaagatgcttataaaaataatttattattttaagaaataaaacatacaacagagcactataaataattttcagattatgggctgttttgattagccaagccctagatgcctccagcctactcccattagcatggataattgaaaatctgctgtatttccattttaacgcagtcttgctaattcatgtcaggcactaagatgagaaaccaaacctttgagtgttatttcacctaacaggtattgagcatgtggcactaacctctatacagtccaaagaagccttcatagcgtagcactttcttaaaacagtcaaagctgtttttatacatgagttctcccacaaaagagccagttgatcgttggttctgcattcgagtttttacaagatcgataggatacacagcagtggctccaacagctaaaattaaacaatatcattatctcagaagaaagtaagataggtcagaagaaagaagaaggtagttaaagtcaaggacaagactgagaaaagaaatgtgttttgaattttaaatacagattttaaaacagtactacctttcttatatctttaataaacaattgagggttttcattcaagtatcccctaataaaaggatgtcatagatattttaaattaaggcacattgctacagcccaacctcattagtaacctgtctttggaaggcctgatctgtagatagaggaaaatgccacttgtaagtccctgatcacatgcaggtatgggaaaagagttccctttactcttgccctacctcacaggtagaaactgataactggcattgggaaagactagagaagactttgtcctttaacatttcaagatggaaaatcagagaaaagagaataggaataacaaaagtgaaaatttttctctcatccatgactaacctccagcaacagaacccagaccaaacctgtaggccgactctgcaacttgtagaagaactggtcgagctgaatcacctgaggccttctgctttgcatgcacaggaatcagagagcaggaaaacaggtgacagaaaagaagataaaacaaaaatgaccatacattaactttaaacattactcattgggttctaaatccatgatacaactaaaatgtcaaggaaaaaagtaggaatggatttcataagttcttattaataaaaagattttagtgctattaatgtttaaaaccaaatttcaatataatcaaaaccatcctttgacaaaaatgatgttataagcctattttcaaattctcattaaaaaaaatgcacagttaaaaacatcactgaggccaggcacggtggctcacgcctgtaatcccagcactttgggaggctgaggcgggcggattacctgagcacaggagttcaagaccagcctggataacatggtgaaagcccatctctataatataacacaaaaattagaccagcatggtggcatgtgcctgtagtctcagctactcaggctgaggagggagaatcacttgagcccagggggcagaggttgcagtgagctgagatcacgccactgcacttcagcctcggcaacagagcaagactctatctcaaaaataaaaataggtcgggtacggtggctcatgcctgtaatcccagcacttcaggaggccgaggtgggtggatcatgaggtcaggagattgagaccatcctggctaacatggtgaaaccccgtctctactaaaaatacaaaaaaaagaaaaaaattagctgggtgtggtggcaggcgcctgtagtcccagctacttgggaagctgaggcaggagaatggcgtgaacccgtgaggtgaagcttgcagtgagccgagatcgcgccactgcactccagcctgggcaacagagtgagactgtatcaaaaaaataaaataaaataaagtaaataaagcaaataaaaacatcaatgagacatcatttttcatcaatcaaattggcaggtttttggtttgtatgtatttttgtttttgttttaagtggcaatacccagcctggcaaaagttgataacaagccttctgaaatttgccattaaagcaagcataaatagagagatgtttagtaatatacacccaaacccttaaaatgtacataacctctgaagttagaataggctgggtgcagtggctcacacctgtaatcccagcactttgggaggccgaggtgggtggatcacttgaggtcaggagttcgagaccagcctgaccaccatggagaaaccccgtctcttctaaaaataaaaaattagccggacgtggtggcgcatgcctgtaatctcagctacttgggaggctgaggcaggagaatcacttgaacctgggaggcggaggctgcagtgagccaagatcgcgccactgcactccagcctgggcaagaagagtgaaactccgtctcaaaaagaaaaaagttaggatagaagataatcatgcatgtaacaagctacaagaatgtagcacttaaaaaacatttgtagtacttattggaaatttcgattatttcccaaatttttgctctttaaacaaaaagaacaaaaatttgggaaatattctaaatgtccaataacggaggactatagcctttaaaaataataactttaaaacaaaaccctatcattcaaaatgatactgtaaaagaatatttgatattaaatgttcacaaggaattataaaagaaaacataggctaaaaagagcatggtaagtagataggtatttgtcatatgattctttgtacctatttaaatgtttgacctatttcctggtaatttttttaaaaacaatttttaagactatatacaaaatgatgtcactttttattaaaaatgcttgtaagaggtttacatatatatgcatataaaattaatactaatattttgcctccctaccacccagagatactcaaaacatttacagtagctaaaactaggtggctgtattacagttgatcgttactttttctctttttttgtccatcttttctaaattcatacttcaggtcagtcagtcattgttttctggttcttttgacctattatcctcacagtgtttttgatgccagaacatttcagagtgctgcacttctctgtctgcataaataaaacagtaattttatgtcacagagagttgtcaaatgagggtgacatatagtcagtgcttaataaatacctgttgaatgaatacatacattcaataaaatttgtttttcagaatccatgataattaaaatcagtgaacaatgaaaataatcagcaaccccagctatcaacccactgaattttagttgctgtcaatgtaacacaattctaatacaatgagatcatttggaatctccttcaaagtcacttaactgaaaatagctttacatagaaatatgcctctttaagatacaaaacatttcttttgcaaattctatgagttgtttccaactgtagccctatatagatggaaatcaatagtaccttcattttgacagatgcatccaaaagagaagcaatattttatttacagggatataaatatgcaatacttagaaatgttctggcatcaaaataatgagtgaaaatactctgaaaattatagagggtggggggaggagggacctaccaccaccattaattcctctcctaaaagacaaatgaaatcctagacttttatttaacttttccaaagccagaactgtagcatgttcttgaaatgagacaaaactctgctccttcactcctctgtccaggataaatgctacaagtgctgcacagtgctggacaggcagcgctgtgcccacaggtggacgacctcccttgcttgaatttgtcgggcccactagggttcatgcagtaaaaagcctattccaggtaaggccattgtgaattgctctaaacctctaagcggcagcgaatcatttcctgctataaatctcatcaatctggtctaaccctttcatggccagtatcaacaagcacccatcataaactctcaaaagctgcaaagagcttaaaggaaaaattgtgggaagccgctgccagctgaagagtaggagggatctaaaaaaaacttctctgcttctcttaatccccaaatttctacaatagctggtggcatacagacgaagagataatcatctcctaagcagtgttaaaaatcaaagggaagggagagcagtgttgcttccacctctacacgtgattatagttatttctcctgcactcagagaaatcggcttcctcttttaagcaaggccagctggttttccagaggtgctcgttagaatttactgagcacacacccactactttgacttgcatgctgcacacaaaactcaccgctgcatttgggtgggaaagagctaaaagaagggggccctggctcaaggtctgacagtcctaaaagtgtagcctgcagcaacccattgtggtcacactggcgtctctgtacaaacccagagctccatgccagaaactgcgaagtctcacaggattcagagatggctctgcctaaaaggagaaatttttctaaaaacgacactcgcctgtgagtggatttattttacaaacaccatttattttactaacacatgctatgaaggcttttcttctctaatcctgatctacagaaagctgggtaagagttaaaggagaaagttccatgtcttaagtttctgactcccacaacttcaagagattggtttctgttaaccataaaataaaatttagcattcctaaaattgtttccatataacttatgaatcctttcacagagaaaataggtctgaaagcctttaaactgtaactccagactaaacaaaattatctcattttgatattcagaaaaacggaaggcatggcagttagacgatgcgctgatgaagggctgctccacagagcaaagacggctttcatttagcaacgtgcagctgccgacaggcacagtgacaccaacacgggattctttcgctacatctctcaacatgagacttcaagaaaggagaaaagacctccttcatgttttcggagcattaggcttctggtgcagttaggaaatcactccaccttagcaagaaatgagcaaatgccaaatacctgtttatcacaccatttctaagcaatttctctttacagcctttaaaatttatcgagagttttggtgcaaaacagaaaaatggttaagtcagataccaatgccgcaaaggcaactgcaagtggaacagggttggggtatcctgctaaggaaaccccagaatgcaagtttgctcctctttgctcacctgcctctgggcctcagccaagttaaagggcagagttccctcttccagaggagcaatccgttcaatgtctgctaaggtcatacgtctgtaggggaaaaacaaacacaagcaacaaatataccaatttattacaatttacattataaaatttaaaaacatcccttttttcatttctcatatttcagtatagccttcagtttggcttctttttctcctgattgctgccctcctcctaacctccttttattaagctaattccaaaaaaaaaaaaaaaaaagccaacttacccccttggctcatataaatctgctaactgaaacaagatgtcaacttccatgggtgtaacctgaccaaatttctgagctgccagaacaaactcctctgtatggaagaaaagttaaaagggaaagattcaagaagaaatagccactaaattcagcattaactcaaggcactggaatgagtgaacatcacaaaactttattattatcatcagttgtagaattcaagtcaatccaaataaggtaagaatttttgcagttcttgcatccatttggaaagcgtgtgcagaatatgttcttgaatatacagtttaaaagcttggggtcatctgatgttattcaaattgccaatcagagaaaataaggaatcatatatgaaacttcatatgcataggtcccaggaggggaagttatattaatctaattaactggttaaattaggattattaattatattaatttaggtggttatattaatgaaggtgtggaattcctaagggaattctgattttttttttttttttttttgagacagagtcttgctctgttgcccaggctggagtgcagtggtgcaatctcggttcactacaacctccgactcttgggttcaagcgattcccctgcctcagcctcccaaggagctggaactacaggtgtgtgccaccatgccctgctaatttttttatatatacatttttagtagagacggggtttcaccgtgttagccaggatcgtctcaatctcctgacctcatgatctgcccgcctcggcctcccaaagtgctgggattacaggcatgagccaccgcaccggctctgattttttttcttaatcccattacaatgctgataatatcctgtcccaagcctacagaccaacttacactgtcaccaatgcaactttatggaattcctcatatacacctgaaggcttccttagaggttgccaatttagctcaagctgtagcaagatttgaaaatatttaagaaactttacatgttttccttattcaaagggtgtcttcagtttatttatttatttatttatttatttttgagatggcattttgctcttgttgcccaggctggagtgcagtggcgtgatctcggctcactgcaaccttcgcctcccaggttcaagcgattcttctgcctcagcctcccaagtagctgggattacaggtgcccaccaccacacccgactaatgtttgtatttttagtagagacagggtttcaccctcttggccaggctggtctcgaactcctgatctcaggtgatccacccacctcggcctcccaaactgctgggatttcaggtgtgagtcaccaagctgggcccagtttgtttaaaacttggtgaagattgttttgtttgcttttgtttgtctgatcaaaggatgaaaaacacacgttatcatatagttaatatgtgtcaatgggatagaaaaataataaagtactagttgccttcttcaccctaataataatacaccacaatacttgcaggctagaattcagatatattctcactcacccttagtcacttcaacatctttcctggtgccagccagagtgctatagatctttctaatgagttccatgttgttaaggagcgaattaaatccattaaaataggagaaactaacttgatgggatgtggtacctccagcagcctcaaataaattgaaaacaagagagaagaaaaatatacaaaagatttatagatgattcagaagtacatacatctaaaactagtttgaaagtaatcaaaaatgcatgtacaagaagaaatgactataagtatttttcttttgcattaaaaaaaagctataaatgatttttagaagcaactgcaactaatcatgaccagaacttgtactctccatacacaactcctagaaaactaaataaatacatgtgtaggattataacaggactagtagtaatttagagttcaaatttcaattggaaatgttttataagttggtttatttcatctaatgagcaaatcttaaaggcttaaacatgcaaaaactataagtacatatgcacacatgtgtgtgcttatgcatgaaaaactgtattgtatcaatgcaaacatactatgaaaagtagtcaatgtaacattaatatcaagacttgtcaagttacttataaccagtaataaataatcatttaggtacagactttacattggtgggatttctagcaaacaagcatattatggtaaaattatgagatgccatatactttcatggggggttaagactagtaaaaattctgataatcagaatttttaagaaaccatatttcttcacaggggacaagggaaacagacagaatgtccattatgaatgagacttcagtttggagtttcaaattctatccttccctagcaaggcaaaatatttttattaggaaagcacttctttacaaggtaacaaccacataaatcttcacttagtaatcatttaaaatagctgacatgaaagtttagtatggagtagagaagggggcgcccaagaaaaggagttagattaacacagtgccagaatggaagaggcctcgttggaataccatgtctctagaactaaggacttgggggaagaaaggaaactgaaaggctactctgagttcctgcctatggtaagcactgtgggaaacccagatgatggtgaaaacagtattctccctgggattaacaaaaggagagttaccacgggctattggtcctaaaactgagttattaccaaaatcacccagaagctttacaaaattagattctaagacctcatcgcctatagatggtgtatgataggcctagaagagatctcagaatctgtagttttaatagtttttagtggtgattctggtgctccacgagcaggtcttaagaaccaccaccacagaatgttgcaggacatccccagggcccatgagggaaggacagcagctgacacctggaggagggaggctccatgaaacacaactgcagggctctgctgtcacatgtaactctgtggcctcgacacatacacggtgaaagggaatctaaggtttggagtttctgttgtgctaactactctaacaaatgatatacatgtgcactattttttttttttttttgccttagagcatctaagaagattagcaaaaatcagcccttgatatacttcaaaatctaaaacaaaattaacatgagatcacaaatctgtttttccttttatctttaaaaagctaatgtatttctcgaagatattccgtattacccagacaacaaattaacctacccactaaaactagccaaaacacactctttgtttgagtttagtaatgtatgtgatcacattaaaatgttagtgtttgcaacagaaaaaaaacactacataacttataagaattgtttttataattccttatttactgagttaaaccacttcattagggcaagttacaacttacagctactagacattcttctacaaaaggagtcaagacatgggggcggatggtgaccatgatgtctcggaagtcgatggctgtgactctcccagtcctagcattgtcccgttgcacaaaggcttgctttgcgtgctccagttgtatttcctacaaataaagaaagtaaaatacttaatttatgcttctcatttaataattactacaaatgacagttcattttaaaatcagactgaagaaagagagtttacatcttgatctaacaagccctcatctgcctaatagcaccaccaagctactgtctccttccaagagacagaactttgctcagaccaatgaacatgtcttgagaaagtgcactctaccttactctgctacccaatgaaacccaattacttccgtgctctctagagtccatgaacacaaagaaaatgaaaaccggaatgaagtgttgtaggttcaaagatctggccaaccccagcttaggtgatgcagatgatctgaggaaaaacactgccagggactttaacttctctccaaagaaaagagaaaaattcttaactgcaacctggtacccaaacacatgatgtaacaatagatagaaaagagtggtggttcttctctgctatttctccaacacagggtttctcagccttgccattattggcattttggacagggtaagtctttattacgggagggctgtcgtgtgtacccctattctcttcccactagatacaagtagccccttccctctaaggtcataacaatcaaaaatgtctctgcatagagccatatgtcttgattaaggactactgctctaagtagttgcatggtatgtggatcaggggaggtaaacctgtcatggtatcattgcatatgtttaattaaaatgatctgaagacagaaagtccaatcacagagctctgttgctattcccaggggataagtgtgtacacaaaagaaaacagcctcccatcaaaactcactgtgcactatatggaaggaacattcctcctgcagagagcattttattatcttcctcacaacactctgctcatttcccaaacagggcccttgcagtgacagctaacttctatgcaattaaaaagtaacaccagccagacacagtagctcatgcctgtaatcccaacacttgaggaggctgaggtggatggatcccttgagcccagtagttccaggccagcctgggccacatggcaaaaccccatctctacaaaaaaaaaaaaaaaaagaaatttgccaggcatggaggtgcatgcctgtagtcccagctacttgggagactggggtgagaggatcacctgagcctggggaggaggaggttgcagtgagctgagatcatgccgccacactccagcctgggtgacagagtgaaaccttgtctcaaaaaaaaaaaaaaaaaaaaaaaaaggaacaccaacagggctctcaaaaacttcaaattatttgaatataatggagtttttttagacgatattaagaaattaatttttaattttagtgagataatgacatcgtatttattcaagttatgtaaaaaataattgtccttatgaatttgtgcaaactaaagtgtaagggaaatgacatgagtctgatactgctttaaagtactcgatcttcctttccttccccagaaaggcagggagatgaaagaagaaatacagtatttgcaataacggaagccaaatagcagttgcatgatgggtcattatagtcttctacttttgcagtttgaaaatgtctacatttaaaatattttaaagataagacatttaatagtaagaatcagagttcttatcctatttaaaagaatctcctcatttgtagccatctgccagtttcgaaccagcctgcctcagctgaaactctcttctgggatcccagtctttctggagcctccaccactggctccttaaatgggaagcatctgttggccctctgtcctcacatcttctcactctactctcctagacagagtgctctctctcttaagccctcaaggatttcttaaaagctaaggcttaactcccatattcaagtctcattcctttctgctggaccagaatttctgtttagagaatatatccacgtgggtatcgtgtaaaggccataaaatgacacatcgctaaccccatattgtagatcccccaacccagtgctcaaacctggtctctcttctatgttcacagcttaattattaggcatgtagttttattggccacctcacctagaaagctgtcattctgaattgttcaagcttcctttctcccagagtaaaccagttaccaaattctgtcccttaggcctttgaaagtttgcccaaatgcaccttttcctttttgttcctgatgctactggttcagactttcctcagacctcatctaaattatcactgagagtcagtggttctgactgtcagtctggagcttgggcttgcagtctggacctctgtggtctaccatgcacacataaaaagttgcttttcagaattaaaaacctgactccctccccctccatggaaatctccaatgacccttcatcatacagacccgtctctgaagcaaggcatacaagcccccagaggaactagtcttagcctcatctcctatcacccatgcccacccctgccagacctgccacacacctgggcttttgcccacatcgttacttccacctagtgtagactgctgcccctttctccagctcctgaaatcctgccacttcctttaagcttagctcaaatggtaccacttaggcaaatataaccaggccttataactggaaataactgatgtcccttccggtggccccctgtctgaatatcaattataaaacttgtcttatttgatcttacatcataatcagttattcacattcctgcctttacacctaccttaccaaggaaaagacagtataaccttttgaagtcctgtaagcatctacttacatttatacatgcagctcagcagaatgctttagatgtatagtaggtgctcaataaatgacaggcattctcatcagtgaaaagtattctgtaaaaccaactgaatgaacaaatcgtgagctattgaacaatgggaggttctctatatgagtgcttccaattaaggaagaagaaatcaactgttaaacaccctgtagtgaaaaatgaccacagtgcgtattcaattgaaagtaaatgaacagtctcctttgaattaccagacccattgctaaagctagctaagccaagactactctcaacaatagtagaaggtatgttcagcgatttaccattttccctagtttataactcaacatcttagagatcctcagacaattataccaaaaatggcaccgctttctctggcaaccccatctcctcagaaagcaggaagccacaatgctaagaccagcctgtccagaattccagattgggaatggatgccaaggtgggggctggtgctcacatagcaggacaggggacatacctgtgattaggacagtgttacaacacatcctgtgcccacgcttccatgattaaacatctatgagcagggacccctcaagttggagtaagaaagttattttaagtctgatgatgaacaacctgagaatacatttccaacagctcttaaagattgggggcattataagttccacagaagacaaaatgctagatctatgtagttctctaaatagcaggacagagtgaaaacacgcagttaggtggctctccaactttaaaagcagcattctgaagacgtgggttgccttctgaagatcatctgtttatgtcgtgactgtttctccttccgggtgaagaaatgaaaccatgacctcaaccagtatgacaaccatgcaatagcacttagcaagcatgtattatgcagcaggcactgctgtaaagcattttacaggaattaattcatggaatgcttactgcaagcctataaggtaggtactattattaacctcactatagcagttgagcaaactaaagtctcactgacaggaagcagtaaagctggaattcaagcctcagcatttctactccccagccctctatctacccatgctcctaatacttcactcaactgcatggggaacctcagacaaagctactgtcaggaatttgattaaaaaataaatttgacactaagaaatcttaacagctgtggaaagataaaaactcaatttgcatttaatgctctagattttactgttgcctatttttgtggaaaaataataaaattccctaaagttttccattaaggcaaagggcttctgtacacccagagcatcaggattgttttaccaatagtagcagagaccaaggaggagagaaaccaaatctaaaaggccttctcctggcctcactccctttttgctctctttcccatagccccaagagacaaaggaggaaaaaattaaatcaggaggccagtgggagctaacacataggttactccgtaaatatgaaagaaatgtgtggtctttgaaataaatgactaggctcactactcatggcagaatgacttaaaatcaaagctcctggtttgcacctcaaaagctatttaatgaaaatctgaatgtatactatgggttgtcaagagactgacagctcctagatctcaactcagaagggataaaacagagacagagagcttttagtatgcatgaaatatagcatatacaaaatagtatttatttctaaaatgaaggggatcagaagtaaacgagtcatctgtgcagaggaggggagaacaatatgggcagtaatcattacattcacatatttaaaagttaaaagactatcaagtaaaaaaaatattaggctgcccctctatttcttttgaaaaaatggagagatgctataggggtcagagtttagcacagtacacagaagaagtctttaacctatagaactattcagcagtaaaatgggctaccttgaaaagtagcaggttccctgacaccagaaatacgtgttcaaccataggctgaggaacacatgtcaagaatttaaccttatctttaatagagggagttatggaagccatacattatgatgacaataagaaatctggaacaggcatgggtagagcgtaaacagaagtcatgacactgccacccgggagagctcaggtgattgtttgcatcttagagcctcagattttcttctacagaataggcacaacaccacctactgtgcagggttgtaaaaaccagaggtcatgaatgacaggcatttaaaaaacagtggctttgatttttgtccaggtgaaaggtttaaaaacctctaaagtctcttgcaatatgaaacagtggttctgctcaatcattctgaactagccacaggaacggaaaaatgaacatcagccaggatggaggataacaaaagctgaatgcttcaacactcactacagaccaggggctatgccaagaacttcaaagacagcatttcacttaagcctcacaatacttctgtgaagtaatgattattatcttcattttacacagaggcacctgaagttcagagaggtcaggtaactagcctaaagtcacacaactaaaaagtggaagagttaagatccaaagcaagggatgtcagcttttaaaactgagattcttaactactaacttatgctgcctcaggcaaaatcataaataagggggtcataactagatttggacaggtaggaaaagagactttaagaaaattttgatgatgatttgaatatataaatgaagtaagatatatctcaaaaatccacattttgaatgatggggaagatactctaccacaaaggaaaatacttaaggggaaagagatgaggtggttgaccatgatgaaaaacctggaatgaagtgagtttcagttataaacaaaaagttaagaggcacacaaaagaaagctgaaggtacaggtagaaatacagatctgggaaattcagataacaggattttagagaaaacatcacaaggagaacgtttactaagttattaagtgcatgctatgtcccagggactgttgtgttttccctgcttcatctctttgaatcctctccacaaccgaggtggtcctaccatcacctctgttctgaagatggaaaaatgaggtaagaatgagccaagggtgacacgggcaaggatgaaactgaatatgcatccaggcagtcggcttctggagccatgatgttagcctacacagactgcctgttccttttagaggggacctaccaaaaaccagatgaagaaaaagatgattgtagaaatgggtgagatcatcccacagtgcatacaaagagcaggcagacaacaaaaatcaaactgatacctaaataagtgaataaagaaaataagacacagggcctgaaaccttgtagcaaatccagagagctgagaaaatgaagtgtctctctaaagagagctcttaacagtaccaggcaatgggtgcttactaaatgctgctgccgaagacagttaccaactgaagacaaatggcccttcctatcacctaaggccagaaggtccaagagcaggagttctgcagctatctctaaggcagttccactcaagtacatgaaaggaggcccaatttctctttaatatgtgccagtgaactattttctgttccctctattctggtgcatgatgattaatgcaacaggcttttattgcagcagtttccaactacttcaacacacccattcagactgctgtagaaaaaaaaaatcaaactcttcaaaattgctagttgtacagaataaacatatataggggttacactactttaggtctaacattcgtgcttctaatagttccaggcctgtcatttccttaataatctccaattttcaggtaggtatattttgaatataaaatattctctccatctctattcagacatgcaagtttgtgctttagcctgagaacaatttatcaggaacaacaacaacaatgacaacaaaaacccaaaaaacccagtccctcaaaacaagcaggagagccaggtgatttatattataaagccaaaaatgccaaaaaataaatatatatattttttgaaccctggttaatttgcatttttgtgttttgaaattttaacaaaatctaaaatattaataaaagcaaagagttaataaggaaatgattcaaaataattcctttttagacatggtaatagaagaattctgggcaaaatgcagctaattgtttatcgaaacaggaaacaaaaatgtagaaagacgatttgcctaaaaaataccatatcacatttagcccaaacaatttctatattacatcacatatcagtacctgtatactggtttgcatataaatatccactttattttcataatctatgctaatttgaagaaaaacattctaattaaaatgaagatccacatattttttaacaaagtaaaaatgaaacatagcaataaaataggtagagagataagtagttaccattcttaattttgttctatgtgtacctccccccaccccccatttggccatgcagtcagtgtcagagttgagggtgaaattccatccccaattcactgggtgaggcctttaattaaaagggtctttggaagcagtgtcacatgtggctcagcatgcactgcaacaccttggcagaaaccaaatacagagcttttccatctcaatttccttgctcttctaatttaacgttaaacttcacagtgggtaacagctggggagatgctgtatagagtgttcatttttaccaggatgctactgtaaaaaccctgcacaacaggctgctcaacaaaacagcaagctaacaccacaaacacaacagcacaatgaatcctgattttctttgcccagagagtagaaagtgtgtgctgtggctggaacgtgtcctgcatcttactgtccaagtgatcacatctctagttactcatcaccaaactagcaatggcttccatttggacacaaaacagaatctcatctagtggaagagttgaaggcaaacaacactaatgtgctctactcactagttcatttgagaacaccaaatgatgctgtttatgaaacaataccaaagctacatcacagaccccacctgatacaacttagaatcaacataaaaggcattcacatagtgaaaatgaaaatacaactgggttcttgggccactaaaaattcatggtcgggctgggcacggtggctcatgcctgtaatctcagcactttgggagggtgaggcgagtggattgcttgaggtcaggagttcaagaccagtctgaccaacatggtgaaaccccatctctactaaaaatacaaaaaattagctgggcatggggttgggcagcctgtaatcccacctactccagaggctgaggcaggagaatcacttgaacctgggaggtggaggttgtagtgagccaagagcacgccattgcactccagcctgggtgacagagtgagactctgtctcaaaaaaaaaaaaaaaaattcatggtctagatactttcactaatacaaacaagacaagttgggggacaaaagggagaggcaaatggctcagattactcaaacctaaacctaagcaaggaccttgttaattgtccactcatctgtaaagaattacggcttcagccagttctactacaagcgattattttttatgaacacatgaaatcgcttattaattctaaagctagaaaatttggggttgccatggatgaaggtatgttttgtttggtggtggttgggcgggggtagtagcaattttgtttttaacacctatagcctcttgtgttgaaattgttgccttacaccaggatgctatgacaaatagagtcgcaaaccgtaactgatggtgagaaaaagccaggaccacatctgaccagcagcagtgaatctctggcttgtagagggacattggcaactaccgtcacccgggagcagcagacttctagagttctactctctagggctcaggatctaaataaccaaaatgttcatgttacacagaaaagaagtaggctgacctctacactgtgctgaccaagaagccaaaataatggtcaatctgctttcttaaaaagaaccaaaattgttcagttgcattactagcatgggtatgctttggcatccaaccaggttatcacgggactcgtgatctgaggacaaggatccttactaatatgaatgaccagtctgggatgccagacacagctttgatccccaggttctattcctagctctatttactacaattcatgtctttgggtttcatcatcctcttctgacaaaatgaggaccagagtaaaactatgataaaatactcaagcccttgtgattagagctctctgttgggtcaggtgacctcattcttaaactctatttgatgagaagccattagataggatttttagcctcattccctctcaggtcagctatcctgtctcttagctagccagtggaatggaatccacaacctcaaaatcaggcctctccacaattcagagcattgcaatttctggatgatgcttttagagcaatagctggatgacccctggaaacagaagaaatttcctggcgacataaagtgcagaacaaaattccttcaaaaaacccaactatacaggggccgtaggtagggtcctacagtaaatcatctcaacaccaaagaattgaaaagaggcagcagagccaatacaccaacacacgtgaacagctcttacatataaagcactactctgtagcccctccttaaaacctcctcttcttcttgtactccctatttcaatgaaacaccaccatcctcccactagcccaaggctaaaacccaagagtcaaccttgagttctgcaaatctatgactgtccccttcccattaaatcatgaagctttgtctggcctatccctgtaagttctcttgactccatttactctggcccatcactgttaccatccaactgagaccacagttgtttgactcttggcttaaaaagcaaccaaccggtctccctctccttggtcacgttcctctccattagatttaccacacaatagtagagtgatccttctgaagcacaaatcttatgaggtttgcctcgacagacttcccattagtcttaggataaagagccgtttacctttacacattcagggttgcctagtccagaccaaagtttgccaaaatgtggttcctgaaccatccagagcatcgcaatttaggatgcttattggaaaggcagcttcttaggccctattcagaactactaaatttgagtcttgggaggggaggtcggtggagaggcctgggactctgcatttctaaatacgcatctcagataatttttacactaaaatttggggggtaaaaactgccagagatttagaaaaattaatttcaacttcaaatccacctgtctaatcttgaacaaatccagaaaacttctttaggcttctgttcactcagctttcatagggaaacaacaccaacaacctaaggtgactgtaaggacaaatattaatacaagaactttcttagctagaaaatgctatatgagaggtagctaataacaatgttgttctagttaacagaaatattgaattttgtagtaatcctagacttttctatcctgagattggaaccagtggaaactcctatgtgtagactgttttcaaattaaagtaattacatgtaaaatagatacccaagattataaaacagtatcaaacaaaaaaacctggaaatgacagtacaatgcacccctaagaacttgttgatgatcgcatctggcaattaatgggtaggggtcaggaatgctagatgtttagcaatgcatgactgggcactgccattcagatgcatggtaacttctaggaacagaaaatagctgtctatagccttagatctggagaaagtgcaacagagtgggaacggcatcgtattcttgaatttgtcacacacctgtcatctgactgcagaagctaagctctagaacagctgctctttaccacccttttgggatacttctttggaaacataatgaaagctatgggccatttccctggaaaattactggtaaatgcaaaattttaccatagagtaggtttattcttttgcatacaatatgtgataatgataatcaccttttaggttattgggaggatgctattatcagaaataatatttaaaagcactttgtaaattataaacattatacagatattagttattgtaacttttttgaaagtgactcagtactgactacacaataatttggtagaaaagttttagaaacctttcattctgtgcccccaagtgcctacgacagtcacccaataaaaaaattggcaaagcaggctgggcacggtggctcatgcctgtaatcccagcactttgagaggccaaggcgggtggatcacttgagccctggcattcaaagttgtagcgagcgctaatgcaccactgcactctagcctgggtaacagagtgagaccctgtctcaaaaacaaaaaaaagaaagaaaagaaaaaggaaaaaaaaatttggcaaaggatgtgaatacctgccattagggtttatgccacaaacctttaagggtttttgctacaaaacaacaaactcatagggcaaacattttatacttacttgtagttgctccttttgcactgtcaggtggatatacccagatacaagtcctagatttttacattatgagtgtctcaagattatagtctctgcacctttcaaacctttgcaaaatcctattgacaaacccgacatgctcagcaaatatttgctgaattggatggtttgcccgacatgagtaatcatcatgacacacaaaaaataccgagttttaggttaatactatttatttatttatttttttgagacagggtcttgctctgttgctcaggctggaatgcagtggcctgatctcagctcactgcaacctctgcctcctgggttcagcgattctcctgcctcagcctcccgagtagctgggattacaggtgcacgccactatgtccagctaatttttttgtatttttggtagagatggggtttcaccatgttggccaggatggtctcgaactcctgacctcatgatccacccgcctcggcctcccaaagtactgggattacaggcgtgagccaccacgcccagcccattaatactatttatcaattacagttccatcagattagaatagaaaaatttctccaaattattttctaaaatacaaagaatattaaaatctattttaaaactagcggctataaaattagaggctttgctctaggagctgggagtagacatacgtggagaggtttacagaatattttaaaatacacatacctacccacatatacaactgtattcacattcacacataccatcattcatgaagttatatggagatgaagttaactgggcattaaaaaatagcagcaacagatgtaacagtataaataatggggtaagagaaatgtgaccccactccctgctgaaatctttccattccaatgaggaagaagactacaggaaggaggctttgtatccctgccacttgcttcaatgttactagatgcaaagttcaaatcagtcaagtttagctcaaataatatcgaattgatttaccacttgcaaagtacaaatcagtcaagtttagctcaaataatatcaaattgattcaccactttatgacttttacaaccaaagcacagaaaaggacatagcaactcaccatgtaagcaatgcccaggactgccaacaccttagtgggtggggacctgtccagactctacacagataaacacatgacccaagtaagatcctcacagccacatggtggtttctaagaagctcacacttgcttagatatagtaaaacatttattaagtgacaaaaaaaaaaaaaggaactgcagagaactgcactgccccaccaatcacacacatgtatatacatacataataagcacaggtaatgtgctggccggaaccaacctgagctatcttctagggaccctcagtggaatagaggagtgctgtctctacatgccatacaagttccctgaaatcacaagcactttttggctgtccctacggctgctccccttcctcatcatgtgacaggtagcagcatgcacagtggcagcttgttcacatttcaagcaaccaagcatctgccttcacagctttggcatcagccagggagttggtgcctatttctgagtcctgcccaagaacagaaaggcggatacctgcctgacaaagcaagagcctgaaacacagcagattaaattcactaatatctttaagaagttacctgtatccagaaagagcccaaaggaagcaaacaaagcatctgaagtagaggtctgaagctctacctacattcagaaaagagttcaaatgaagcaaacaaaacatgaaatggaaggaaggaagaaacccaatggtagacattaaaactggcattcaggtaaagcctatcatggtccatccattaattcctataagtccggatctggactaggacacaaaagcaaggccctgactgagatcattcaccactataaccattgtaatctagtaaaagttcagtacttctattctggctacagaggcaaaatcatcccacataggacactgtgggatgtttccatttaccattataagtcaaatttaagtgaatgccttacaaattgtttggaaacataaccatagtccctgagttatttaatcctggactctggcttccccatatctggaggaaggcccagaggctgctgtgagcagttgaaaatctactcaattcagtataattgacacttgcttagaggaggaaacacgatcatccttactactgctaacatcccattaaaactaaaagttaattaggctgtgttccataaagtcaatttgaggcatttgtctcaataacattattgtcattattcctcatcaaaatgaataccgcctcctacagcacaacaatgtcctgtggaaacagcagcaaaaatccggcaactcacattacattctccatctgagttacgtaagtaggtttatgtttacagagaactgaaaacagggattcacagacattaacgctttgtttttaaaaaatacaaaggcaggtttagggcatcttgtttatgtttccaaaggcctggaaaataaaagcaaactagacagcaggacaaattatatgaatcataataataccatgaaaattcaaaaagagaagtacctattgaagttaacctatcacaaatgctagttgctaagaatggacaccacaaaatctttaccaagtgagcaccacaacccgtgcaccctccacctctacccagaacaggattccaaccactccccagagggctctggcaaggtctggaacacacgaaaaagccaggggcaccaggatacccactaaggacatttctagtaacaaagaattgaaaattttcctcaagacccaaaatgtaaacataccaaatgagtccccttacatgagtctttttaaacatatttaataaagtataaataaaatgtaactgttagaaacaaagcaaatgcataaacatctatatagcctatagatattgacctctagtgactacatgataatgttgtatttaaagtatttttaaataatgctgctgaaggaaaactaagttataatcatattttgtgaatactcttctccttgcatcatcagtggcccaatgatatgatcatatgggtgggggaagggggtcacgagagaagggcagcagggactgggttagggaaagtgcaccccagaaatgtagacaactgctacagcggttaacccacataagaaagtgcgcaagtgcccttagcacactggttctccatgagggccacccaagaagctttaaatagccctcaaatacccaggcttcccccctgcccccattaaatctaatctctagaggtgggactgaggcaacattagtttttaaagcttccaggtgattccaacatgcagccaagtttgagactagtgtcttatctataaaaggtgtcagatgaaatgattctgaagctgaagacaaatctgtccatttccaggggaaaacaaaatattggtaagtagtaacacagcgagtcacaagccaaaattttaagttgtaattttgcccctcctgatctaagtgaccttgagaaaatcacttgatttcccggggcctcaatgtgtattccttctaaacatggaggagttctacataaatctgtggaaatcccatttaattctatgatttcaacatattaataaagaaatacttctcaatgggacagttttgccaggctaaactgtagtaagtatgtagtaagtaaatcacagtatgtagtaagtaaatcacagttcaagactccaatcaggacttttacacacaatttgattccaggtttacttatttacccttttaacttttttttttttttttttgagacggagtctcgctctttcacccaggccggactgcagtggtgcgatctcagctcactgcaagctccacctcccaagttcacaccattctcctgcctcagcctcccaagtagctgggaccacaggcgccggccaccacgcctggctaattttttgtatttttagtagagacggggtttcaccatgttggccaggatggtctcgatctcctgacctcgtcatccgcccacctcggcctcccaaagtgctaggattataggtgtgagccaccgtgcccggccatacccttttaactttttaagagctagacccaccaataaaaactgagtaaattccgcatatgtcaggtgtctttttctttcttttccaaaatgtagttgcacaaattctgaatcccagttaaatggaatatgttgatgaattgtggtctgtccaaaaacttgcttaacatcctctgaaaagagaaaagacaggttgattaaaacaaagtaaatgaagttctttctgataaaatctgttattgaatggatatcgctttttcttattaaaaaaagtaattcaattttaaatagacatacagattacaaactatggcagaaataaaagaaccctcaaggaatcagttaagaaatcaaggtcaagaatcccaccaaataaaataaagggggggaaaatcaagaagtctctcacacacacacaacctaaaggctgtaggaaacccaagtagaaagctaaaactattatcatctcatttgtttttgtttcaagaaataatgattattttctaggtacagaggacagaattcaatcttagtggcaggaaaacacatacacacacacacacacacacacacacacacacgatacaagcgttacatatagcctttaacaagttatttaaaagtttttggaagatttagaaatccattaggaaaaaatttgacacacatatttaacacccctaaggctgtttctgtgtttgaaaaagtccaacactttatcgagctgcacgtgaagacaaagaaaatgaggagaaaagccagcagcagcccaagtctttgattttctactgcactcttttggcttgacccaagagttctcaaattgttcaaataatcccatttaagatgggccactgaatgtgctggtcctggcttaggatctctttttagcctctacagaaaaactgtaagaggactgacagagaaaaaacaaacaaacaagaaaaaaacatgaaaaaccttacttttctaaagcttctatttttatttttagcctcctcctcttgataaaagtatgtgtttggagaatggaggaaatacaaattattagcatattaataatttttcctggctttcacatctttaaatatatctaccaaacctgctcatttctatgagcaaactgtgcttgatacctttttttctcttttgcttctatttaaaacaaaaaaagaagaagaaagttatttagtcctctgaaaagtgccaaaacctttggcataatgtgtctatggtttcccctcaaatttcctgctcccacccccattatacccacagtttttattccacgtttttaaagtttccagaaatttttaaagccttgtcatgaagaaacagtagtgccaccattagcataaggttaggtgtgtatttgcacagagaaggcagtaaaaaatcaggattatgctgggcataaattttataaaacatggcagaaatcctcagactggccctgatgaggacaataaaagttttaaagtacaagtactgaatttattctgtcttctttacttttagggaaaaaagagataagatataaggaaaatgaagtgaatccagaattaggatttaaaggaaaaacaaacaaacaaaaaagattctcagtgagtctgaccaggggtcaataaaaggaattaagtagaagatttctgagaagaaatcaccaaactgaaattcaaatgacttggattcaaattctactaacagcagctaaaatttcttgggcactcaccatgtgccaagtattgttctaatggctgtaagtcccttaatatcttaaaacatgactttcttcagtgcaaaacatattaaccgagataatctgtgactcctttccaggtgtaagtgtctgtatctctgtaggaagcaggcccaataaagttttaataaaggctcccataaccttctaatctagatgaataaattatctaatgaaaataatgctcaaatgataaagatgtgaccaaaagaaaaaaaattcacactgtaaataaaattttatactagaataaaattttagagaaataatatgcaagaaaaaatggttttctggtttatcctcagttaacttaaaaattcctttctgccaagcattccagtgaaataaagttttaacgtaataatcataggataattgtcaaaaataagatttttccccttcttgatctctccttcaatctctgtttcccatagaaagtaacagaaggtttttactaaatagctggtatgtaaagctaaggcacttattatccatttttatatttatatggtctaaaattataaatatacatgaaagtaggtttaagtttttctaaaattagtgaatgcatgtaaaatgtgtctcaccataaacaacaatcttatttatctataattaaagtaactaccatttacttcttactagagctcacatttgaatccgaaactctaaacgctatagttttttggactacaccatagactgtgtgtgtgcctctatgaaatgcctggctgatgtactgaaatctcctctgcaggatagagctatacattatccctaagatatctctcagatctaaaatctgacaatcctataggcctgtactaccaataatgatttgtttgaaaaaagatctctctataaatcttctagagtatactatactagatgtatataaaagatctctatatgatgtaatataaatcattacatagtatgcatatgtatgcacatattaatgtgtttgtgcatatttattgcacgtcttttatttcctaattgattattagccccttcacagcaaagaccccattcttcgcatctgattctaccactatggctggcacagtggtaggcagagagcaactgctcactaagtagttgctgaatttaaatgagccagaaaaggtttacaacagataatgcaacaggttaaggacagcggtattaaccctttggggcactacagtttcccttgctgagaaactattcaacagtcatttctcaccacttcagtgcactgcatacaaatcatcagtcaacatcgtttatcaaaatccccaggcccggtcctaaactgatttaaacatgttgaggggctgaaaaaactgcattttagccagcactccaggttttcctgatgcaagggtccaggacctcattctgaaagcattatcagggagtatggaagggttagattcactcctaatttttaacttctcattgaaatggataaaaatttaaaaggaaggaggtagagaagactctccagaccaagcagtgtaatgcaggaatgtgtaaacacagatcatgtgtgacctaggtcattcagggctcccatgctgcacaactctagtggatggcattcacttcatggtccatgtgactggtgcctcctggagttggggagtgtatcaaacacatgaccctgaggatgtaggcccattattagctttgtggctgttccaatatactggctattgtaggaatgtcagggcttagctagctagctagcaaccttctaagtagcacagcttgggagcactgtactaggtcctgtgggaagaggaagggtagtaaaaggtatgaggctacatccaagtctaatacttgagaaataattcaacagcagattcaaacagtacactgtatcagcactaaaccacagggtggcctcatggtaaggaaatggagatttaaggagagaagtaagagagaaaagcttactggagcagataaaccatgatctgggacctgaaaggtgtcaaggatttactaagagggacctttgagggagcttttcaatggcgatcaatggcatgaagaaaggttcatttcttttgaagtgaatcaaaggtccagttacagtgctttggaccaaagccacctgggatcactgagacatgatagatcctgctccaggtagccacagacattggcatcacctgccagcagcaaacattattttaaagcccccggggcatgatgctatgtttatggtgaagaaaagtttgctatggaaagaacagttggccatgggactctgcagggaaaaaaaggcctgaagttgtttaccacttggcataatttctacgaaatttactttttactctcttgacctacctagcaggattatgtactcaaatatcataagattgccaagccattctaattggagaagccaaatgatatgcaaaagattaaaggaaacctaccaatatttctattcatctcacaactaataaagtcttttaaaacaaaatattaaatcttgttcctctggaaaactcacacattttctccaaaaatattttatagactcataagtttctgaatatttcattctgctctaatgaatcatcctagggcattcattttctgaaatgtttggtctctacgttttcctgcaggctcatgaatagaaacatctataaactcaataatcactatgggttccttgcatttctccctcactctgggagacattataataccacgtcaggttaatattcttttctccttttaggaggcacaaatagctttctcacttaacatttgattgtttaagattcctctatgtcttgtaaggctctcagaggtaagaggaacaagtcccagctctcattttatagctgaaaaatcagaaatgaaaatccaaagcgattttcaagcccagttctactctatactctggctcccacatgggcaattccatgagccttactatgaaagactccaggagtcaaacttagagttgccctctcaccaaacccgtaccattccctgaccattccaaacctaacttgcagtcctggagaggaaagaagaaacccaacatgttttagcttttttggttgcttacttggttcagaataactcgtaactcagtcgtggaagactttcaggtaagaaccacctgctagatctatctcaaatgtaaaaataattagaattaggtctcttctggtctaaaatacaaggcttatactcttttccccatgttgaggtcatataggcaaagaaacaaaactaattagcattaaaatgtgcatgtagcactagtatatattttggatatataaagtcatatttttcttagttcagccactcctcctaaaagtaaagccaaattagaatgcttattttttaaagtaaagtataattgttgttatttcagtctgtgccaaacaagctatgtttggaaggcctgtagttcccataatatcaccaaataatagtgatattatttaaagtaagacctcaccaaataagctcaaggttccttttacttgtggaaccttgctttctccacaaaagtttccatcttaaaagtctgccgcatttgtttatatcatgagaagacaattacaaagtggcagttgtttacttcctaaagataacctcaaaaagtcaacctatttctcccaagttagtaagtttcccaggctacagggtatggttatagtgaaaagagttgagacctttaaaagttgggtcacagatcttatatacagaaaagtcctaagaaatcactaaaaaattattagaactaataaataagtctagcaaggttggaagacagaaaaatcaatatacaaatatcaactgtattgctatatatttgaaataagcaatccaaaaatgaaatttaaaaaacaactcggtcaggcgcagtggcccacgcctgtaatcccagcatttgggaggcccaggcaggcggatcatttcaggtcaggagttcgagaccagcctggccaacagggtgaaaccccatctctactaaaaatacaaaaattagccaggcatggtggtgggcacctgtaatcccagctactcaggaggctgaggcaggagaatggcgtgaacccggaaggcggagcttgcagtgagtggagtgccactgcactccagcctgggtgacagggcgagactccgttgcaaaaaaattaattaattaattaattaattttaaaaaaactcaatttacagtagcctcaaaaacaataaaatacttagaaataaatttaacaaaataagtgcaaaactgattctctaaacactacaaaacagcattgaaagaaactaaagaaaatctaaataaatagaaacacatcccatgttcacggattaaaagacttgatattgttaagatggcaaaactctccaaagttaattttaaaatggcaatactccctaaaatgatctatagattcaatgtaatccctatcaaaatcctggttggcttgtttgcaaaaattggcaaactgatccaacaatccattatgaaaattcaagcaattcagaagagccaaaacaatcttgaaaaagaagaacagatggagtcttgctctgttgcccaggctggagtacagtggcatgatcttggctcactgcaacctctgcctcccaggttcaagcaattctcctgcctcagcctcctgagtacctgggattacaggcgctttgatacacccagctaatttttgtatttttagtggagacagggtttcaccatgttggtcaggctggtctcgaactcctgacctcgtgatccacccacctcggcctcccaaagtgctgggattataggcttgatccaccacgcctggcacgaatttggatttcaagcttactacaaagctagagtaatcaagactatgtagtactggtataagatagacacagagaacaacagaatgaaattgagagtaaaaaaattaaccctcacatttatagtcaattgatttccaacaaaggtaacagacaataagaaaaaactggtgcagggacaatatccatatgcaaaataatgaagttgggctcctatctcaccctgtatacaaaaattaactcataatggatcaaagacctaactacaagacttaaaaccgtgaatagttttagaagaaaatataggcatattttcaagaaaattttagaaaaaaatatagacataatttttgtgatgttggattaggaaatggtttagttgacaccaaaactacaagcaacagaaaaaaaaataaattatacttcatcaaaatttaaaactttatactccaaggataccattaagaaagtattaaaatggccaggcacggtggctcacgcctgtaatcccagcactttgggaggccgagatgggcggatcacctgaggtcaggagtttgataccagcctgggcaacatggcaaaaccccatctctactaaaaatacaaaaattatccaggcatggtggcacgtgcctgtaatcccagctactcaggaggctgaggcaggaagaattgcttgaacccctgaggcggaggttgcagtgagccgagatcatgccattccattccagcctgggcgacagagagagactgtctcaaaagaaaaaaaaaaaagaaaaaaagaaagtgttaaaacacaatgagatacgatctcacaccactcagaatggttattaaaaagtcaaaaaataacagatgctggtgaggttgcagagaaaaaggaacacttatgtactgttggtgggagtgtaaattagtttaaccactgtggaatacagtgtggcaattcctcaaagacctaaaaacagaaataccattcaacccagtaatctcattactgggtatatatccaaaggcatatacatcattctattataaagacacatgcatgtgtacattcactgcagcactattcacaatagcaaagaggtggaatcaacctaaatgcctatcaacgatagagtggataaaaaaaatgtggtatatatacaccatggagtactatgcagccataaaaaagaatgagatcatgtcccttgcaggaacgtcgacggagctggaggccgttatcattagcaaactaatgcaggaacagaaaaccaaatactgtacgctctgactttaagtgggagctaaatggtgagaacacacggacacagaggagaacaagagacagtggggcctaccagagggtaaagggtgggaggagggagaggatcaggaaaaataactaatgggtactaggcttaatatctgagtgatgaaataatttgtacgacaaacccctatgacacaagtttacctatataatgaacctgcacatgtacccctgaacttaaaataaaaaagtttaaaaaaaagagagaaaaaaagaaaagaaaaagataaaatagcctatagactaggagaaaaactttgcaagtcacatatctgataaggaaccctagtatacacacagaactctcacaatacaataaaaggacaaataatcctatttaaaaatgggcaaaggatctgaacagacattgctccagagacagcataaaattgccaagaggcacatgaaaagatgttaaacatcattagccatcagggagatgaaaatcaaaaccatgatgagataaccacttcaccctgctacaatggttataatcaaaaagagataataagaagtgttggtgaggatgtgaaggaactgcaaccctcaaacactgctggtgggaatatatttaagaaaatggtgtggccactttggaaaacagtctggcagttcctcaaaaagttcaacatagaattataatatgactcagcaattccactctcaggtatatactcaagagaaatgaaaacatatgcccatacaaactcacatacatgaatgttcacagcaacgttattcataatagccaagcactgggaacagctcttatgcctgttaactgattaataaacaaaatgtgacctatctatatctacacagtgaaatattatttatcaataaaaaggaataacatatgtgctacatcatggatgagccttggaaacattatgctaagtaaaagaaaccaatcatgaaagcccacattttatgattccatttatatgaaatgtctagaatagacaaatccatatacacaaaaagtagattaacaactgccaggggatggagggactggatggaagggagtggtgattgctaaggtgtggtacgaggtttcttgttggggtgatgaaaatgttctacaattgaatgtggtgataattgtacaaatctgtgaatatattaaaaaccattgaattatatactttaaatgggtaaattatatctcaacaaagctttctctgaaaaaaaaaaacaaaaaacacctagaactgtcagagatctgcctcttactaatgagtaaccctgggcaaattacttactctgactcaattcgctcaatctttaaaatgggaatatctatcttagacagtttttctggagttaagcatgactagtacaatgttctaaacatagtaggtgaccatcaaaatcataaaactccaaagtataaagtcttaattataatgaaaattattatctgggcaccaaatatttacaaatactattttttaaatgagcacagtgtgatttggaagtatcatagtttttaatttctcaaaaagcaataattttcctcaaatatttaaaatccatcctttcttgagctcatatgctaaaattttgaatgaaaagtgatcaaaaactaagtaattttctattatgtttcttaaagtataaaattaagaaagattaagaacctccactcttttctctgaagatctttcagacactagagatatttaattggcaaattacttgcacatgccattaagtggttagactgaatttgtttttacaaattctatggactcttattccttaacctccaccacactataatctgaaatcatcaaggtcttcacttatgcaaattttaactttccatgtttttgtttccatacagaataactaaattaatgcattttaatttctaaaagattcactttttgaagcagcatatctatgaaaaagagtttctcattaaaataaaaaagattcatcaagctatattatttcaaacactaaaccataatctctctctctttctcatggattttaaaaattccattaatacaataaacacaaaagggatgtttgtgttaaacataaaagtaacccctcttggaggcaaagagaggactgctgaaggcccagcattttatctctgaacagtttcatgctttttctaatgcatgctaaatcctcaaagaaagttgtggtttttctctaagggaagtaatattccaccctgctgatatggttaacaaccagcttctacggccatcatcttttaagcagggagcaaaagacaaattgttgaattcgtacattaaataacataatggagtaagtggatgcagacctatctctactgccatatgctccaatatcaaggttgccatttcaaacccttttgacaagtgcctttttacattaatcacagctaagggtctgaagaggaaagacgtattctggctacaattcagagtcgctcaagaaacttctagggggaaaatggttgccattaaaacatagtaagtagagcataagtacttcacattaaaattgagttctctataatcccctgtaaactttttattattattattctgaacatgtaggtacagtggtgataggtatctttcaaaaaataagcacacacacagccaagctgagccaaatattatactaaagtcatatgtggtattggtgtatgtaaaaattagggctaatttaaaactcttccagttctgtacttagggatggaactagcctgagttaaggtcatgtggcattcaggaaagaaccctatccttctagtgccagaagtcaaagttgtgattcttatgaaactagtcaccttttcccctctgggcctgtttcctcatccatgaaagaaagccataaactatactcagccattgttcatttgaagtaggaactacattcccttggagagcttgtttaaaacacattcccaagccccacacccaaaaattatgaatcagtagatttgagacagagccagggagtccacagttaaccaacattctacactattacaatgagaacccatggtctacctcattgataagactccctcctcctctataatctgacagatctatcaattctcaagattcatacactatttaagtcatcatagtgactgtgagtcaacaacaacaacaaaatggctcaaggctggcagatatttagcgtaagatattaaccatctgtcacacacactaactaaatcaacagaggggccaactgagatgtttccaattatctgctagaaaaagtattttcaactgggtagaataaatcattattagcctttcataatatcaaaagtaggtcaattaaaatggtgtttagaggcatatagcagactgtggccactctccagatgtgtaagcttgctttaatcatctgctgtgtgttaattattgttaactttcattaccactagagaatacaactaatgttttaaaattcttaaagcattacagagtcctaattcactctctaaatgcaaatataatatctatattgttttcaaaaacctatttcctaagctagtttccttagacggatattatcgaaaattttcttgcaaaagcattaacatacatttaaccctacttaaatgcttcaagagcagatgtactacaaatgtacacccacagtgatcccatattagtataaaactgttttatttcaattaaaatgtctaagtatccacccccaacatatacctaaactgtaattttctctgagaatttccaatatgttcttgattttgtttcctttatcaacctatcagagcaaaaactgccttgcaactgttggaagaaatcagtcattagcagcaagattacagcaaattttccaatttagaaaaactgtatttttatctctctcttataccagaagaagaatggtataattttcctatctttaaataagcagtacagttagtttaaaatagtcaaattttcctaggactctaagtttcaggattttatgttagctttctgttctctacaccttctttcctactcacaagttctcttcacccttcatcatgcatgcacatgaacatgcacatacacacacacacatgcacacacaaacacacaggtgcacatgcacacacagggacagcagcccccagtccagtctctccactccctgacaggcttctaaggaacagttaaccttcaggcagtagttaactaaggagtggcttcacatggttattttgatttgctctccaactgacattcttccaccttctcaacaggtctgccttcttttctccccctctctatttttaaaatggagtgatgaagtagcaaaaagtacaatattttagccatttgagcacgggcgattcttaaattatcccaccaactggaagtgctctctgatactactatctttcaaaattgaagccattatggtcaatcgtgcaaatccgtatttagcttttcgtaaatagtggatttttgacccaatgaactggaacagtttctggacagtctctaggatctctgaaaagatactcagtacccaggcatgccacaattcttatcaacatagagactatttactttcaaaactcatactgttcttattcgaaattcttactctctatttgggatgtaagcatgtataagagaatatactcagccccctctttacctctcataaaataaaatcaaatctactgcagggcaatatttttctttcatcaaaatgacacattatttttgtgaaacaccaaaatcagaaccaatattaatgaagaactttccccaagtaacgtttcttctgattcttcaccaccttctccctcagctatcttttcgaatatttcattttcgaagtgtctttacaaagacagtaacaaatgaccttcctttccagcaagcttaaaaatgatgggtaaagtctgccttcttccaatccaataccagcattcctctagctttatatatttaatattaaatttgagtgcttaacttcgaaacttctcatttccatacttttaactcccatcattttctgcaacctgaatcgaagtgactgagtgggtgtttccacacatttcctaatgtcatctagcctacccattttcccaaagcacaccaatttcatcatagcaggtgttcctggacacaatctaagttgaactcagaaagggtccctccaaacaattacatccacatcagagaattaactaactgaggactcgcttagaattaagaattaactagcttagaaatcgccccggttctgtgggttttgtttagtgggagagacacaagagaaaagttggtgcaaatataataagtttgctaaactacaatttaaacaaagttaaatagatttattttttccgcaggacttctcagagccttaataaattaaaagttccaggctttatgattctctcttaggagagcccttttccacatgccacttattaacataaacaagaaacgcttctctatagttactaaacttacaatatatttcaatagtgaagattaaaggacaaaaggtcactgtagtttccaataaagggcaaaactggaccagtttctttcagactccatgctaactggcagagctgcagtggcgagccagcccaggcctcccagtgtggcacagggtgtagactagtttcttccattttggtcttcatgagaatcagaaccaattccctttcagaggtctcactagccagccaaccaaacagttctttctgtattttattttgtttatttatttttgagacagaatattgctctgtcaccaggctggagtgtggtggcacgatctcggctcactgcaacctccacctcctgggttcaagttattctcctgcctcagcctcctgagtagctgggactacaggcacatgccaccatgcccagctaatttttgtatttttagtagcgacggggtttcaccgtgttggccaggatggtctcgatctcttgaccttgtgatccgcccgcctcagcctcccaaagtgctgggattacaggtgtgagccactgcgcccggctctttttgtatttttaataattcgttagttactctacatttacttcagttacagaaaaatgtattttccaatctgtctcttgtattatatataggttgtctgatacattttgtttcttcatatatccaaaaccaaaaggcatccaaaaactgattatcattacattttgaagtcatacataaactattctacaatcaatgtctttaacagcaatgctggaaaagtgttaaataagatatatgtctactagttcaactgcccctctataaaaagcagcttttatctttaaagggcagctcactgacctctgtgagatttgctaaaacctacacaatttttccccaggaaaaaaaaaaagctcatttagacgaaatattacaaacaaccatagccattcacagactccctgatacttatccaggcaaagagttgagaacccttgactttaaagtttaattaaaaactgcagaacataaacatgcacacaccatcattaccaccaacacttgtaatgaaattgggttacattcaggtattaaggataactttaaaattgcacgtaaaacatatttcatgaaatcttgttcagtgtactgaaaaataaatttaaaaagtcaaaggaagagagaaacatgtaatagcataatgcaagaaaacatttgggagtttaacctaagaaactggtattgtatagatcatactttgaattttcagggggtctacttgtgactttcctcagataaaagcaggtattcaagctctcggctaggcacggtggctcacgcctgtaatcctagtactttgggaggccgaggcgggtggattgcctcagctcaggagttccagaccagcctgggcaacaacggtgaaaccccatctctactaaaatacaaaaattagctgggcgtggcgatgtgcgcctgtagtcccggctacccgggaggctgaggcaggagaattgcttgaacccgggaagcagagcttgcagtgagccgagattgtgccactgcactccagccggggcaacagagcgagactccatctctgaaaaaaaaaaaaaaaaaaaaaaaaaagtagtattcaatctctctgctactgtggagctaggctattaatgtggtacaacaacttaagaaatatcagtaagtaggaataggtaatgtcttaaattagcattataagatacatcactggtatatatgccaaatagttcagatcgacagtttcattaaacacacccacacatccacacaggtactctttcttaaaacccacaatggaaatgttttgcaccccccgcaacattaaataagaaatacagtaacaggaaagtgtctgagaaactatcactcacaacatgtctgtaccaacctgctcacacaccaggtaagtccttccaaaccctgactttcagctcttccactcacaaagtggggtgactatacgctggcttcacatagatactgtgaagcctaaataatgatcactggcatggtacccctggctttgccccactctagtcaactcagcaaaaatcatctcttccaagcatcattctgatcctatccctgtcctccaaagaccttgtagtgactcctaattgcttctcatatgaaataattactcttgcttaagggcccggccctgtcgttggtgccctgacaaccaccctcccaagtactcaggtctcttaagctgcacccctcaatcaagggcctcctctactatggttcccctctatcctcaacctggacacagaccatctcctcacccttccctatcgtcctgtgattctccccttcagtcagaattctgttcatatcaaaagataaagcttttctgggtaaaactcacatcgtgtgcatctcaacaagttatccagatagctggaaccaaggcaactttctatgtacactggtaactctaagccaggtacgttctcttccttattactttccaccatagtgaaaaaaaatcgtaactaatgcatttgcctattgttctttacttcatgaaaaatattaaatccttctaatgtctgatacagactgagaccacaatgggctaactgacacctatctggattacagtgggcttgctccaaaagcatgagtatcaacaccagagggaggcagtgtggcacagtgaagaacagtcagccaggatcaggctgctctcccagctccatcacaggcaacactatgactgtggccacttactcaacttccccatgtctatttcctctacagaaaatgagaattataatagtatagaccttctaggctacaataattaaataataaattataccaaaaatacttagcccagaggttggcatgtattttaaaataaaaatgatggttaccttacttctctcatgagattatgtaaaaccacatatcttgggaacagaacaagaccagtagctaccacctggttcttcttcctttcctttggcccccttcctctcacccatggccaatcgggagccaagtcatacagattagctctcaggaacagcccagtgtgcagtggctcatgcctgtaatcctagcatcttgggaagccaaggcgggaggattgcttgagcctaggagtttgagattagtctgggcaacatagttaaactcacctttacgaaaataaaaataaagttagctggacatggtagcgccacctgtagtcccagctactcaggacgctaaggtggaaggatcacttgagtcaggcatgttgaggctgcagtgaacccagatcactccagcctgggtgacagaccttgtttcaaaagaaaaaaaaaaaagaaagaaaccaagaaagaaaaaaaaaaggaatggcccaggtggggtcccgagatatgactccagtccaggcctctgttattcccagcctccactgtttgtggcacttccaaagtggccatcacttccagacccccacagctccaacccttcatggaatacaaagcccatatcatgccagttcagtattaatgcatctttggtcactcctctagatctgctcagatagcttccatgctttctacccacttagcctgctttacatacaaacaggatattctgacatcatattttttgtatttgtttatagtctctctccctaaaacgttcctcaaatgtatcaaacagactccgcgcttagaacccgggaaatggctattattttctgcctgcgacagtctcccctcctccatccccatatctacacgaccaattacctcacctctttcaaaaaatgaaaataaaatcttttttttttggtggaaaaaaacacttaacatgagatctacccttaatagatttttaagtgtacaaaataatatcgttaactatcagcacaatgttgtgcaggagatttctagaacttactcatcttgcttaaccaaaactttatgccggctgattagtaaatccccattccccctcctcacagcccctggtagccaccactctttgattctatgaatctgcctatttcaggtgtctcatataagtagaatcatgtaatatttgtcttctgtggctggcttatttcactcgtagtgtcctcaaggttcattcatgttgtcatgtatggcaggactttatggctgaataatattctatgtatataaattttctttacccattcagctgtggatgggcatttaggtcatttccacatttggctgttgcgaacagtgctgcgatgaacatgagagttctgatacctctttgagatcctgatttttggataaatatccagaagtgagattggtggatcatatggtacttctatttgtaaatttttgtcagaatctccataactattttccacagggactgcaccaacacatttactatcttacccttatagaaaatgtttgccacccgtgatctagtataaaaaataacaccataaaaaagaaaagaaagaaaaagaaaactatgttgacattcgaaacactaagtttaaagagaaaagaccttaaatttcaaaaacaaatttgtgtaaatgtctcctcacataatagcacagatttataattaatataatgacagcttattcccttatttattatttctctgctttggttacaaatgactaggcaattaatatcattttttctttcctcttcttaccctgcttgtcttccaccatgatttactccctttgaatacccctcccatccactatggtaaccaaaatttgacagtattggtaacattccaactcacataattctgaagtttctttaaatgtattatattcaatatgtagtaaaatatatctattgaaatatttatgaacttttaagaaggtaatacttatttgttatctcaaatataaaattcagctcacgtttctactaccttccttctgaggtacttagcactgattcatccttggcagtagtcctatctgcaaaattgtacacatgcaccagcatctttagataacaaataacatagatgtgttcctttctctttcaaaatttgtagtgttcatcaactcaaaatttccagagtagtgagatatagacagactaacacttgttattaaataaacttttatttaaaaactttaaaaattcttaaaggaataaaacatttatttatacatatacatatagatattatacatattcaaggcaatagcatgtgaaatcccagcaggatgtttgtggaaattaatgacttactctaaaattgttttgatagtgaatagggccaagaatagccgagataatcttaaagaataaagttgaaaacctaaccagatatgacttataaagctgtagtaattaagatagtatagtattagcggagaatatacaataatgtaaaaagaatggagcattcagatacagtcccatactggatttatgatagtagtaccactgcagtgcaataaagaaaagaaccatctttttaataaatggtgccaggcaatcgacatatccttggggaagagggccagggaagaatcttgacctttacctttagtaccatgcaaaaatataacaaattctagaaagattaaaatgtaaatctgaaaggaaagcaaacttctggaagataacataggagaatatcttcctgacccggaggaaaacaaagaattttttttttctgttttgagccagagtttcgctcttgtcacccaggctggagtgcaatggcatgatgtcggctcactgtaacctttgcctcctgggttcaagcgattctcctgcctcagcctcctgagtagctgggattacaggtgctgccaccacacccagctcatttttgtatttttactaaagacagggtttcactgtgttggacaggctggtttcaaactcctgacctcaggtgatccacccgccttggcctcccaaagtgctgggattacaggtgggaatcactgtgcctggcctagattttttaaacaggacacaaaaagagctatccacaaaagaaaatgctgataatttgtactacattaaaattagaaacttatgttcctcaagactcaaatgagttacagtgcaagtcacagagtaaagaatctgtgaaacatataaccctcagaggtcttgtatccagaaaatacgcacatgactgaagaagatagccaaatggccaataaatatggaaaaatgtcatataacccattaggaatcagggaaataaatgctcattgaagccacacagtgagatatcactaaaataaaaatggctgataccaactggcaaagatctaaaataaaaccatcatgcaatgatggcatgagtgttaactggtaccactgagaggtgacaatgtgctggcagtcctcgctcgctctaggcgcctcctcggcctcggcgcccactctggccacacttgaggagcccttcagcctgccactgcactgtgggagcccctctctgggccgaggccagagccagctccctctgcttgcagggaggtgtggagatagaccgtgtgggcaggaaccgtggctgcccacagtgctcgtgggccagcgtgagttctgggtgggcgtgggctccgcgggccctgcactcggagtggatggccagcaccgccagccctgggcactgaggggcttagcacctatgccagcagctgtggagggtgtgctgggtcccccagcactcctggcccacccacgctgcactcgaattctcaccgggcctcagctgactcccggcggggcagggctgtcaggagctggagcccgccatgcccaagtccccccaaccccgtgggctcccatgcagcctgagcctccccaacgggtgccgccccctgctccgcagcgcccaggtcccaccgaccacccaagggctgaggagtgcaggcgcatggcgtgggactgatgggcagctccgcccgcagccccagtgcgggatctactaggtgaagccagctgggctcctgagtcgggtggggactcggagaacttttatgtctagcaggaggattgtatatgctccaatcagcactctgtatctagctaatctgatgggcacttggagaacttttatgtctagctagaggattgtaaatgcaccaatcagcactctgtgtctagctcagggattgtaaatgcaccaatcagcactctgtcaaaatggaccaatcagctctctgtaaaacagaccaatcagctctctgtaaaatggaccaatcagcaggatgtgggtggggcagataagggaataaaagcaggctgcccgaaccagcagtggcaacctgctctggtccccttccacgctgtggaagcttttgttcttttgctcttcacaataaatcttgctgctgctcactctttgggtccgcattgcctttatgagctataacactcaccatgaaggtctgcagctttactcctgaggccagcgacaccacgaacccaccgggaggtatgaacaactctggacgggaggaatgaacaactccagaagcgccacctaaagagctgtaacactcacagcgaaagtctgcagcttcactcctgaagccagcgagaccacgaacccaccagaaggaagaaactccgaacacatccaaacataagaaggaacaaactctggacacaccatctttaagaactgtaacactcaccacgagggtccgcagcttcatccttgaagtcagtgagaccaagaacccaccaattccagacacaccattactttggaaaacattttagcaagctctactgaagctaaatatacatattttctgtgaccgagcaagtctattcctagaaatgtctatacacaccaaaaaatatgtaaagcaatgtcaaaagcatattgcttgcagcagccaaaaatgaaaatgttccaaaatgtttatcaacaatagaatggataaataaattaggatagagtcacataatggaattcaatacagtgaagaaaaacaaaaaatacatgcgacatggattaatctcacaaataaaatgaacaaaggaagccagaccaaaagagtacattctatatagttccaattaaattaagtttaaaaacaggcaaaaccaattgatagtgataaatgtcagttgttaccattgggattggggaacagtgactgggatgagacctctaaactgctggtaccatcctctttctgatctggctcgtggtaagcagatccagatgtaaaagttcagaaagatgtacacttaacaccatttgtatattcttctgcatgtatgctgtcattcaacaaagtgtactttaaaaaatcactgtcacatacaataggctaaaaatacaaatggaaacatttaattttttctcctcacatacagaatcacaaattaactagaatttaccagtcataccaacaccctgtcatatacctgttgatatctcaagatacttataaacagaagtaaggctgtacacctacaactatctgatcttcaagaaaactgacaaaaacaagcaatggggaaaggattctgtattcaataaacgatgctgggttaattggctagccatatgcagaagactgaaactggaccccttccttacgccatatacaaaaataaacttgaaatggattaaagacttaaatgtggccagacatgacggttcacacctgtaatcccaacactttgggaggccaaggtgggtggatcacttgaggtcaagagttcgagaccagcttcgccaacatggtgaaaccctgtctctactgaaaaatacaaaaaatcagccaggcatggtggtgcatgcctatactcccagctacttgggaggctgaggcacaataattacttgagcctggtaagcagaggttgcagtgagccgagatcataccactgcactccagcctgggcaatagagcaagagttcatctgaaaaacaaacaacacttaagtgtaaaactcaaagctatattcttggaagacaacctaggcaataccactctggagagtggaatgggcaaagatttcatgacaaagacaccaaaagcaattgcaataaaaacaaaaattgacaaatgggacctaattaactaaagggcattctgcacagcaaaagcaactatcaagagagtaaacagacaccctacagaatgggagaaaatttttgcaaactatgcatctgacaaaggtctaatatccagcaactaactataaggaacttaaatttaccaggaaaaaacaaccccattaaaaagtgggggaaaggccaggcgtggtgtctcatgcctgtaatcccagcagtttgggaggctgaggcgggtgaatcacctgaggtcaggagtttgagaccatcctgaccaatatggtaaaaccacgtctctactaaaaatacaaaattagccagacgtggtggtgcgcgcctgtagtcccaggcactcgagaaactcaggcaggagaactgcttgaacccaggaggtggaggttgcactgagccgagattgtgccactgcattccaacctgggtgacagagtgagactctgtctcaaaaaaaaaaaagaaaagaaaaaagtaggcaaacaacatgaacagatattttcaaaagaacacatatacgcggccaagaagcatatggaaaaaggctcaacatcactggtaattagagaaatgcaaatcaaaactacaactagataccatctcacactaatcagaatggttactattaaaaagtcaaaaaatagctggtgctagcaaggttgcagagaaaaaggaacatttatacactgctggtaggagtgtaaatgctggtaggagtgtaaattagttcaaccactgtggaaaacagtgtggtgattcctcaaagacctaaaaacagaattatccttcaacccacaatcccattactgggtatatacccaaagaaatataaacattctgtcataaaaacacatgcacacatatgttcaccgtagcactattcacaatagcaaagacatggcatcaacctaaatgcccattaatgatagactggataaagaaaatgtggtacatatacaccatggaatactatgcagtcattaaaaaaaacaacgagatcatgtcctctacaggaacttggatggagctggaggccattatccttagcaaactaatgtgggaacagaaaaccaaaaaccaaacattctcatgtatatgtgggagctaagtgataagaacacaaggacacagagaggaataatagacattacggcctaccagagggtggagggtagaaggtgggaggagggagagaatcaggaaaaataactaatgggtactaggtttaatatctgagtaatgaaataatttgtacaacaaacccctgtgacacaaatttacctatatagtaaacctgcacatgtacccctgaacttacgttaaaaaaaaaaaatttaaaaaaattttaaaaaaaagggcttcccaaagaaaaatgaaaaaaaaaaaaaaaaacagaaaatcttttcctcttttaggctatttcttttagtatcactatttgtataaaggcctttgtttttcagacagtgccttttatgcagtgaatcttttaatccttacatagtcctgtaaagtagttattaccccgattttagagatgaggaaaataaagctcagagggttgaaatgacttgtccttcagctagtaagaagcagaaacaaaatccttatgcaactatgccttctacaattcaaagacagctcttgtttcctacatcctgcttcttcactatcattttcttctaatcacactaacacacacactttgccctgcaatggtggaagtctcctacgtctttctaggaccagtggtaaagctggtgtcaccaatatcccttgccacttcacacgcatgaagggaagatggatctatatcaaggaactacctgaagcccatttctcagtcctctaatatcaaatcgaactctcttccattcctcacatccagacttgctggggaaagtaggaggacaagacagaacacacctatgctgaacatgcttacactcacaggctttcctctgttcatccccaggaaacgctattataacaatgtcaccaaactcgcttccattgagtaaatcaataacaccatgagctagctgcttactcattacttgaagatttaaatggggactttctaaaaattggtattccattgaaaagttgtggttgcagtggtgctaagaggaactgggtgatggaaataaatttcttctgaggatctgtaaatattaaataatcctcatgaagtattaatggaaagcatctgatcttctagaaaccgggcaagtatataattttttgtctttgctcaagatgatttaacctttaattctgtcatgccaaatgagtatgacggaatggcgaagggggttggcacaataaatctattatactatcttaccaatactttatctaattattatattcacttcttgataagataaatgaggactggagaggatcactaatttggctcagagacaacagcagcagagctggaaggggctaagcttatctgattctggaagcaacactgttacaccatctgtatttttcccatatctgtatgttttccacaatacatcaaataagacaagtcccaaaggtctgaatgaattagaaactatgaatagagacacttaaaatgggcacatgccaagcacaagacaggcagaagtcctgtctgggtctcacgttctatgacgctatgaaaacagtcatgccacattctccctaatctttaaagccatctctcatgaaagcacaatccacatgcctaaagggctccaaaattcttcatgagcaatgctactgcagatttgcatgcagagacaacatatgctggacaccacagagtccaagggaaacatggtactttccgttaaatctgtccttagtagccagttttttaaaaaataacttaccactgtcccaccacttccaagccttccctttcttctaagaatttgaaaaacatcagggttttctgcagctttgtagctaattcccatgatgatgtttgtgccttgcaaaataaagaaggccacaggagagcagacactgccagcacagcagtcaggtcgggggagcgggggttgtttagaacaaggtccttcatgtaccattctgaaccaccatcttgtgcagcagctctggccgcaaactactccatgggaacaacgtgaagacaagaagtatagggtgcataagtaacttctgtgtgtaggcagattattcacttcttcgttctatcagtggaaagcactactgatgatgcagggaagaaacagaagtcctgtctggctctcacatgctatgactctatgaaaacagtcatgccacatctccctcaccttaaaactaaatcagagtatcaaaactactaagccagaaacttgtttttttcgaataggaagatgtttgaactggagctccaaaacattgaagtatctttactaaaagggatatactatcttctataaagaatttccatacactttattttgttcctagaaaaaaaaaaaagaaaatgctcacacaagtccacacttacacagacgtgcacagaagcatgcttcttaccaaaagttacttctcctttgccagctttgtcaaacagctgaaaggctaccataaacaaagcatcaggggcacacaggacagattcaaaggcaacaaattcttgaaaagatattaatctgcaacataaaacaaacataaagcaaaagtcagtagcttgtggaaaacagaagcatatacaaacatacactgagggaaaaaataagatatcactgccaaaacataaaattcaaactgaaaacatttataaacatttagcatttacttttacatatagtggactgaaataataatgcacagaatctaaaagacatgacagcattgaccatgaagttacacactaaatacattataatttcaaatataactgttttatccagcatcatatatgtttcagtcttccttcaggcatgtttttgggttctataataaaagtgcagatactttagactaagatgtgactgcctaacagcaaaatagagcaactttgttatgcattagtatccttatacaccatgcaaaaaacggttcacagatattgattcactactggtatttactgaccacctgtgaattgacctagggctagtacaaggggaatacagataaatgatacatgaaacatgaccccaagggacttctagtctagtgaggcagacagcactggtctagaaacagactagtgtatagaggaaggacaaatcataacacaagaactagtatggtaataaaagtctttgtggcagaaatggcatttgagctaggccttaaaaaatgagtacaacttggatatgcggtaatgggtgtagactagagggcacttcaggcagaaggctaatgcaagaaagctaaggagtgtacagggaaactgatgagtgacagattttgtctggacagtggagtgcataaaagaacaatgtaaaataagattagaaatataggaccagaggtggccttgaagaaagaaaagggcctggtcattcttctctaggaaaaaggagtgactttaactttccgaaggtcaaaatgtgggtcaaatctaagctttaggaagaacatgagaggccaaggacgttttgacttccaaagaggaaatgggtccataaaagctttcctagattttattttttaacaactgctattttaagtatccaaatactttaatgatacattgagatactccaagtttccggaggatatggaaggaggaagaaaataggaatggttttcatatattttacagaaaacttagttacttctaaacatcctatagagagaacacatttttataaaaactgttacaaagtgaacttagctgtttcccagaatgtcacccaattacaataatgctacaaagaaaggaaaaacgcagtgtgttcaatatagcatctctgtatcattaaccatccaaaacacatgcttctcaatgcctgggaacactcaggaagagcatgtgttacaggggagtacttcccaaggacattttatcctctactaaggtctctctcaccgagactctgcgtaggaggcaagaaggggggcaaatatgagtcaagcattcctggctgaactccaggagcttaccaccagctgtttggaggaaggggagatagtcatgagcacacataaccactagaaattaagagttaactgtaaaagaaaaagtaaagcactaaggggcataaaaggggtgaattattctgcctggaagagttggggactgcttcatggcggcatggtatttgaagaacaaattttaaagctgagaagatcttagggattatctacttcaacctcctcattttacttgtgaggaaacggaaactggaaaaagttaatgacctgggttaggcaaaacaactggcttctgacattttggcctgaaaaccaggtctcctggcttccatttaacctgggtagaattccaactgctgtgggaagatggtgaaaccatgccccacaggattaaagaatttggtaactaacaaaaatttattaagcttgtcttgcaggacagcagagaagaaaaccatttgttacagttctctctgtttgccacaaaattggctgacagactgaggctggttggaaccaacatagctgactggagtctgggcagaatagacttcttctcctgttgagtaaccttttgacgttagagggccaaaaactcaccctcagttcaagctaatgccaccactgtccaaaggtgcaacccatgaagcagcatggaagggcaacagcatgcccaagacactttccaaaccccctttcctttcagccaatcactaatcactgttcaccacctaaactccacactcagaagccctcccttaaatctatggctgtaaggctggtagagaaagtcaaacttgagtgtgactcctctccccttactcagttgcctggcaataaactttcttgctgcaaaaaactggtgctttgtgtttggctttccattttgtgcaggcaaatggaccgactttggtttggtgacaatggagagaggagggaagggtagagagaggacattctacactggggaagcaaagtacagagatgaaaacaaatggatgtgctgtatttggagaagcatgtaggagttaccaattctccatctagcaggtcatgaggagcaaaagactggcaagagcgagatgccagccacctagggtggaccttaagggccaagcaacagaatcttgacttttttttcagacagttaaaaatcactcagtttctggattaagaaatgtcacattcaaaactttgttttagaaaaagaactggtgtggaagatgaatttaaaggagagatgagatgtgggagacagcctggcagccagggatcacagggttctaaacctgagtgggggccctaggaatggaagcagaagaaaggctagagaaacacagcagaggcagaaattataaaatgtggttaggactggatgttggaggccaaggccaaggaaacaggccaggatgttcccaacatttccaacttggataactgagtgggatgatgataccaccaccaaagataaacaagaaaaaagaaaaaaaggtaaaaattggaaagaagggacctgtgggagaatgtaaccaactgtgactgtgtttgaggtaacagtgggacatgtagtacagtgtccagccagaagccaaaagagacccaatggactcaagagagatgctggtatgggcagaactgtgtcccccgtccccaaaaatcccaacccctagaacctcagaatgtgactttatttggaaatagggtagctgcaaatggaactagttaagatgagatcatagtggagtagggcaggcacctaatccaatatgactggagtcttttttataaaacagggaaatttaaaaacagacatgcacacaaggagaaaaccaagtaaagatgaacatagagatcagggtgacgcttcttcaagccaaggaacaccaaaggttgcccgcccaccaccagaagacaggaaagaagcacggaacagattctcccttacagccctcagaagaaaccaaccctgctgaacctccaccttggatgtctagcctccagaacttaggacaactaatttgtttttttttttaaagcttcccagtttgcggtagagtactttgttacagcagcctgaggaaactaatatagaggccaagattggaaacacagatctggcagtttttaaagaaaggttacttaaagctgtgaataaaagtgcccacaagcatttcatttagagatgtttccttttccttttccttttaagacatgctgtaataaaagaagaccttgaggaattcaccgacaggcccgccacactatagacttctgaagccggacagaagacaaatgtgtttctggccctttgcttcccagtcgccacgcctcctcacatcccccaaccctgctgagcaggcacccacagccacgcagccacacagtgctgctctccaggggaacttgctggcagtttgttgaggccgaaaacaatcatatttgcttaattaccccttcacagacattaggttcattaaatagaatcacactatgcgttatctagaaaagggatgtttttggtttcatggtctgaataaagaaaggcttaatatatataaaaggcttatataaaaaaagcatatataggagaccatatacatatgcaaagcttataatatataaagacatatatataatatatattatatatatgactatatattttatatatatatatatatatatatatatatatgtatgtatgtatatacaaagccttgtctggcaatgttaatgtttcataactgagaatagccaataaatactctggtatttcaggcatgttactgataccaaaaggtatgtaatttggtaatcctgttagatatgagtattatacatctatgcaggaggtatatagatgaaccataaaatcataatgtattattgttcaccaagatcattttggattttcaaggtaatctgactagaaggccatgagaataattatgtagtactatattactttacagcatgatacctaaaaatgtttatatatatatatgtatatacatatatatatatagacaaacagtgcttccgtcttgctttacagatttaatgagcattaacgtaagttacaacaaagaattcaagcttaatcaagttcagacctggctggtgaactcacttagttccttttccacccgcaactcccagaacttctttgacaatgttagattccctttaaaatgaatcatgcagctctgattaactctatgactagaatctaaggaacagtatttgccaccacacttatctgcaggaactaatagtagaacatgggtcagctaacatgaaagcaaatgtacaagtcacatttccacaggcctataccactcagagattaggggagggtaggtttctaactactctatttcatggttctgatgctactagatattttctgtaagcaagtcatttttgttttacaaagcattagagctgctgttctccttctggaagccatttataacagtagcgactttgtaactcctttatagtccaagtaataataaaatagccaaagcactgcgtagtactataaaatactgggccaaagaagaaagagttgaaaagtgaattgcatctgtatgctatgcttacacaatgtaaatattaatcatttatcacatatgtggaaaggtactacaagatatataccaaaatgatgatggtgcttcttcactgtagcgtaactttaggtccctcctccccccagctttgcaagggatagcacttagcctggagatatctgaaatataatagagaatacagactaaaaattgtgatattatggaaaaagtaggttaagtaacataagagaactggaaataaatgactcaatgaattcagaggagggaaagattactgtcatgttgagtgaaaggagatggagaaagccttactgaaattgcgaacacatgacaccagaaggaagatgtgtttggtgaacatgaactcagtcttgcaataaaagtgaaatgtgatcaagtaaagatgggagatgcgggaggagagtccaccagctgcagtttgacttcaatgcctattctacatgtttggcagagggcagttctagggacgcaatctctgctccccagaaatggtggtccagaggggcagaaggtaagccaggtaccaaggaaggaagaccagagatgaagaatcacaagaaatccatatttgctggaggaaaactagaacagaaaatacagtgccggggttgggtgtggcagctcatgtctataattccagcactttgggaggccaaggcagaaggatcacttgagtccaggagttcaagactgcagtgagctatgactgcaccactgcactccagcctgggctacagagtgagacaccatctactagaaaaaaaaaaaaagaaaagaaagaaaaaaaccctacaaagttgctcacatcctgattatgaggtcctgtgatggtagaccaagatctgataattttagtgatgtgatcaatttgtgcatcagaacatttaatctgacagaggagtgttaaatgaacttaaggggaagagaccagagttgaggagatgcgatggcagaatccagggaagagctacgaaagccgaaaggagaggagaggggaggggaggggaggggaggggagggaaagaaaagaaaagaaaagaaagaaaggaaagaaagaaagaaagaaagaaagaaagaaagaaagaaagaaagaaagaaagaaagaaagaaagaaaggcactttataccaagggctgggagtgcagcatctccggagaacaatttgacaacacagcaagagtctcaaagatgtctttatggccactctgggtagcctatgggttagccctgccccacaagaagcagttagaaaaaaacaaaaacaaaaaaacacctctttactcctcagccaccacaattgcacttctaggagtttatcctaaaaaataattcataaatgcgtgcaaactttaatctacaaggatatttacccagcactgctggtaatggtgaaaaaagtacaaacaacctcaatatacaacaatatgtgatggactgaatacagaacattgatatgcaggatactatccaaccactaaaaagtgttataaacaaatccatggtagtaagtaaaaagtcatttacacaatgatgtgtagaaaattatttgtttcttaaaaatggacaataatattttgcatacacacaaagtctgaagaaggcacaccaaagtgttggcagtggatatcatctctaggtggttaaattgttagaaatttaagatttttttctgcttgtccatattttctaatcctttcaataatatacatactgcactgttcttacagtaagaaaaaaataaaaattcatatgaaacaaaatagcaaagtcctcaacttagatagtggcaggaggactatataagagatttggggagaggaagacaaattgaaaaaagaaacaaaggatctgaaagaatcacactaacggacaacctccagttcttctcctcctctctgtcctcgcttattctcactcagcagaggcttagaccccatgtgatccctttcatctcctgcctggctcctatctccaggccaactctgtggctacgaaagtttaagcaacagcacataggaattgttctgttcatacttcaggaagtttggttgtagacaatgtaccatcaaaatccaattaccacttttactgaaggttcctaaccacaagagtacttcacaaaaataacttctccttatacctcttctgtgtgttacagcagaagccaagcaattgtccagggtcaatggcagagatgaaagtaaaatctaactccaaaaacacagttctaaccatcagaccacacaagtatatgtgggtgttaagaaaaatctggaactggactctcctgtgatcaccagtttatccaaatttatccaaagctttggtctccatgatttttaacatcttttaatagcttttggcttttatagctcttctctttcccgcccatattccttgcaaatacacattattcaggcaaccaagctgtaaaccaaaaataaaattctaagaccccttgatggacttccttcttagccaaggcactcttcaaatttaacctaaaagactgtttctggccatgacgggaagtgggggttggacatgtctcattatatcttaagtctgataagaaatattcacaatctattccctctgaagcctgctacctaagggcttcatctgtacaatgaacactttggtctctacaataccttatctgaacccagacatttcctttctaataatcccaggtctttaggtaaactccaaccaattgtcaaccagaaaatgtttaactctacctataacctggaagccttcgccccacttcgagttgtcccacctttctggacagaatcaatgtatttcttaaatgtaattgattgaaatctcatgtctccctaaaatgtgtaaaaccaagctgcaccccgaccaccttgggcacatgttctcaggatctcctgagggctgtgtcacaggccatggtcactcatacctggctcagaataaatctcttccaatattttacagtctgactcttttttttttgagacggagtctcactcttgttgcccaggctggagtgcaatggcgtgatctcggctcactgcaacctctgcctcccgggttcaagcaattctcctgcctcagcctcctgagaagctggggattacaggcgtgcgccaccatccccggctaatttttgtatttttagtagagacagggtttcaccatgttggccaggctggcctcaaactcctgacctcaggtgatccacccgcctcagcctcccaaagtgctgggattacaggtgtgagcaaccacaccggccccagagtctgactctttttgataacaaagcaaatgtgtaccctgttcctattatatgataagccatgccccaggcactaaggatacctcaaaattgacaacatctatgtcctcaaggaaccacatttgcagatgggtggaggatgagcacatgcatacataaaaattccagaattagacaaccactgcatagggtaaaatagagcaacgccttggaatcatgcttctcagccccagatactctatttcattggtctgtagaggggcctaaacactcatttggtttttttttaaacttctcaagtgattgtactacatagccaggcttgaaaatcaacttcaggagagtaatggggttgggagataaggctactttgcctaaagcggtcaggaaaagcctctggtgaggaggtattgagatctgaatggtgaaaagcagcggccaggaaaagagttggaggacagggatgtgaggagaaacatcagtgccagcgcccaaagcaggccacccttgttaagttccaaagggcagggagacctcgagcagctggagagtagagaaggcaggggaagggaaaggggatgaggatgagggaggtgccgggcataaaaggatgcctggattttattcctagggaaatcagctgctgttgaagggttttatgcaggggagtgatgtgactcgcctcagagttagaaaggttacgaagaacactcaagacactgtggagcacgggccgccgggtgaagcagtgagcccagttagaagcggctacagtaggctaaacctgggtcgtagcaagagaaccaaggagcagtcaaatctgggatacattttctaaacagctgttaaggcttaattacgtggggtctgggggggtcctgtcctggaagtcacagcaagcagtttttaaagcccaggagctgctcagcccctccccatcaagaggaggcccagtggccaggggctatggcagtcacaggcacagactctgaggcttggaagtcactgaggatatggaaactaccagttaggcagatgaagaggatgctcctaagtaaagatttttatttaatatgttagttgatggtcagcaagcacacaaacgaagactcacgactccaattatgcaaattcatgactattgtttctaatctgatctgaaaagagacaatgagtgattacccaatcttctaaaaaccatcaggaataaggtggacagaagctgagtcctatagggtcttacctttgcctaactggctgaatgaccttgttggacaagttggaacagatatcctttcttgttccataaaaggtgcttttctcggatgcctttcattctaaaatcctgttttcttccattttaggttacaggcagccattctgtgcccaccctggctccagaaaggaccttggcattccctggagtgcatgtgttctgaggccagcagggctcttcagctctactatgtactctggttcaaatctcgctgcagtgtttgccaagggcctatttaaattcattggctccagtgaaatctggcagattgaatattgttcaaacaagcaggctactgcctggctttaaaaacctattaaagatttttattggcaattttactgtatcgttatcacaaatttggcctataaatatcacctctgcatatatcactgcctccatattggcaaaagtatatatatatatatataggctctcgtaattgtgagcttaactcagtaagtgatctgtccatactgccagctctacttggcagcccatcgccttgcagctgactccaaacagcagtcaagttgcccaaggctgactgtgccaaccagggggatttactggggtattcttatacctccaacattctctttcttataagatggatcaagcacatttgacaggtatgattcatcccttttctagttctcacttgctagtacgtagttaattcaagtaacactagaaaatgtctttactcttcctataccccatttattctttccctccctgtaaaataaccattactcaatgagatgaggagaatctgccccagtgtccttgccacctccctcaacctctcttttaaccttcaagtcacaaaaatgctccgatcacggccaatccctacaaagatgattctacatcaaggaaaagaaccactacaagcctacaagcttttaaaactagagacaaatcatattcaccatctccacaattctttagataaatatcctttatttcttaaatactagtagacatcatttaaaaaccccgaaaagctatcttattatactacattgttcctattttgtataattaccaacactgagagcagaatttaataatgtgcatgacaaatagtctgcattttaattacatcatggatattttgagatctaccaaagacttctttttaaaggaaaagtctactaagtttaaacaaacaaaaaacaccataaatacctcattttaaattacgtattgccttcaaagcaggaggaaatcaaaagaggtaaagaaagaccattgaggaaaaaagggaaaagtaattgtaaaccatgatggaaaactgattaaggcaaataaagcagatttaaaaacctaggtttcctaaatctttctttgttctactaattaaggctggataaaaaggtctcaatgttattaaaatggcaaatgaagaaggatagtggggaaaccacaaataagaaatcagtaactgaaaagccagcaggcatatgaatttgtcagcgtatactggcctacactatataaagcagcatgttggtttattctcattaccactggataaccaggtactttgaatgcacccaaggacagaaagactggcctgcatgcaagggcacacactgccaaatccttcacttctctaaccatagtctccagtttgatcattcccttgatttagggctgaaaagcacaaaagtacctacagggtaccgaaggcacagcccaaggaacagaatgttcccatacatacttttagttaatgcccatattacctatgtttgttctcagctcaaataacattttaaaataccaaaaattgattgagctaaacgattttttaattggaacacaatgcctttctcaataggtttttctgaatctctgaagcaaggtaatgatgattaaaacaatattctaaaacgaacaaaaggcacataagcataggcacacaaaaagtgacaagaacatgctattttcttgcatctgccgttgatcaattcctagtttgtcactgttaaaaaaataaaaatacatcagcagtaaactaaaatttttaaaaaatacatgaaatcaaaattatactgattcctctttgagaaacattatcaattactcgggaacattttggcattttctttcattcaactgtaattcctacattttggatacacacaaaacctctcttgatgtgactgtaataaaagtccctggcaaagcaaaaattaaatgactgaaatagcccttatcattttaagaaataaaattattcatggtgtgggcaagaagaaataaaaatacccaggcttgagccagaatatcacaaaaaaaagccaacattaatatctgctgtgccagctgaattcaaattaacccaatttttacatgttaattaaaccagctattttcttcttattgtatttttgcttcttaaatagtagagtctacaagtgattcccaacagacttgttccaacaacaatgacgtattcatttacttctattatgaccatacaatacagtaactgagcagtaatttttcacagtcaattacatgtgtggttctttatgcttaaagatgctgaaataatgtgtactatagagccatatgcccgaatctctagtctgccagaggcagttgcctgggtaacacattttctctccggtttagcataacccttcactgaatatcattaggtgtcattaaatagcaaacattaacatgaacttcaatatactacttagatagagtcattttacccatgtaaacaagtgttccatcatttatctaagcttaaaatagattatgattttctgtatttaagaccataaaaaagaaaaaaaaagtgcccatgtgttgatttcagattgaatttgcagaaatttctgatgacgtaagagaactcagaccaagtttcagaataacatttcataatattatggtcataatattcaatgtaagcaaagaaagattaggctttaaaatgtactcgatcctataaaataattccatcaattgtatctcagatgaaagattattgtaccctctttaataaggactagggagaatgcactcaaattcggcaacaaaatgaacttaaagaataaggtgcttaaaaatcaaggtatataggaataaatacaaagtatgggatccattgtgcattatctaaaatttttttacagctttattgacatataattgacaaaaattgtatacatttaaagtgtacaatgtgttatttttatatacatatacattgaaaaatgattatcacaatcaagctaattaacacatgcaccacatagttgtctcatatagttaaaatattttaaatgttcaaaatttaatgaagtactatatggtttagatgtggcaatatatagtttatacagggtgttctagagcaatgtctgcattgagagtagcagctgggaaaaaaaaaaaaaaaagaaagagtagccgctgtctcaaatactctccatcagcctacaccaccccaaacaagcatccacatctaagaaaaacaatgtgctttttctacagtctcaacagtcctaatcctattaccactcccaaaccaaggaattatgatgtttctgagatacatcataatttcagatgaacctaaattcagcctataagcaatcacagcttttcctctatcatccacattacaaaggggctccaaattgtcaatgttaattttaaaggacacatataaaaagaaaatgaatcatcaaatggcactactacccgaatttattttcttaccactcctagtataggagaagggtagattctaaaatcctggcagcaagggcagggggactcatagaagttcaggggcagcatcaaagctgtccacagtcaacttagaataacaaaagagagagggtggccaagaataaatgagttcttcttggttatggggaatgagattccagatactactacgatgatgaagtggaattttttttctttttcttgcacctgtttcctaatgcaaaataagaaagaaacagccacacaaaatggtgcaacttggacttaggtaccatgctcctacctccactgctccaaaaatattcatctgtttgcaaaagtaaatagaacctcaatcacgagttcagtctgggggctgggaagtagttagcaggaaaaaaattatttggttttaattgtatattccattttggtttcagcactctgttttgaatgaatgtttctatgaggcaaattataagaaacaaattgacagcaaggataaataaatctttaagcaaaatattttcaagatatactgctatcaggagaaattaaattgcatctctgacacctccatgacaattcacattctgaatgattaagacattctacaatttcaaataaaattttaagaaattaaaactaaattgtataaacggtagtgactgggaaaagtagcctaataccttatgaaatgttacaaataagaattaaaataaaaagtgatttctaaagctgggcacaattgcacgtgcctctgttctcagctgctcggaaggctaacgtgggagggtcgcttgagcccaggagtttgagaccagcctgggcaacggagtgagctctcatgtccattttttgtaaaaaagacaaaaagtaatttctgcttacaatatgctgattaagtagcatttctagattttactccaaatccacagtaaacagaatactactattcccacctctattcccaatacagattaaaattttactacatgaacataatttgcttgcttaaaaactggcgcaagatctggtaaagaaaaagacatacacatctttcatatttagtcatgttttgttatacaaatagccacaccaaaatacaatgaattcacctattaacacaggccacctgtgaatatagattttctgaaaataaccaaaggagtttattatgactgtttgagcccattctatttaggttcatattttattttgctcatggaagaacctatataaatgctgaaaagcagttaagaaaaattttctgtcccaattgatctggcatgtttccccattctatgccatcctatctctgcacttcttaccaagttctatgtctaaaggtctcctaacaatttcaagcttttttaaaacgcaggccattacaacacagaacagtaattgtaaaagatcatcaaaattagaaactgttgggagtactttatatttttgcaagaggaaattaagctacacaacttttgagactctcttgcattttcttggtataagtattgcagaaaagcaacatcaatattttaatgctttttccttcagaaattggttactgttttatttcttaacttagcaaaaaaaaaaaaaaaaactctaggccaggcatggtggctcacgcctgtaatcccagcaccttgggaggctaaggcgggcggatcatctgagatcaggagttcgagactaacctagccaacatggtgaaccccatctctaccaaaaatataaaaattagccaggtgtggtgacacacgcctgtgatcccagctaatcaggaggctgagtgaggcaggagaattgtttgaacccaggaggcggaggttgcagtgagctgagatcacaccactgcactccagcctgggtgataaagtgagactctgtctcaaaaaaagaaaaaaaactctagaagaaagtactgaatcagaaaatcataaggcaagagaaggtgggtttcaatatgaattacatgttcagctaaatccttaggggctttcagggttttgcccaagtagatgcaatatcctcagtgaatctaaaaagttatattctaaataacttgaagaataatgtgaacagccaaaattcactaaaagagcagcgacatggctgtctttacttaactctacggcagaaggcagttaacttaccagaccataagacataaatgagcgaggacatgccgaatggttggaatccaccaacactttgggacatgagtccagtcccttgtaaggatgctgaagaatggggcaggattctcaaaaatatgagaatctaatcctatatataggtggttttttcaacacaaagaattcctcagaaaaagtttacaaaaactagaacaaccccaaaatactgtggaagcagtctacttggggaggagaaaagtgaagacaggagaagaaaaaagatttgctaaaagttttagacctgttacaaaaaaaaaaaaagaggctccataaaatattacagtggtcctgggagaaaaatgacagcagagattttaacatgtaaaaattcaaagaaggaaccatagagagaaatctaagaatcccacctcttctggataatacctcacatgtgcatggaacattatgtgttcaatccattcaaattagacaaatacttatggagtgctactatgtgccagccacgttctaggatctgctgactcagcagtgaactaaacagacaaaaatccctgctttcgtggagcttacagtcaagtgtgtgggaaagaggaggagacaaaaaaaaaattaatgaaacccacatgtattatacaagataaccaccatgagaaagccctaaaggaagtgagtgagattcttaggggaagtgccttacagaaggaagaggaagtacaaggcctctaggtgggaccaagcacggcaagcacggtgtgttcaaggtgcggcaagaagaccaatgtcaccagaacaaagtaattaagggaaagagcagcagatgaagtgaggggctggggaggtaacgtaaggagagagtaccacaaggccttgttggccacgagaagggctttggcttttactctgagtgaaaatggagagccataaaggattgtgagccagagagtgacataatccaactcagattttaacagaatcactctggctgcacaagaagatttggtgagaagttattacaataatccaggtgagagatggtcatgcctgcgtctggttatggagtaacatcctccataatgctgagcagaatttttaaaaagtaaatcaagtaaaatgcagggtcacatcattgggtgttgaatcactcagtgggaatgattctacagaactggccaactggaagccacacaccaatcaccagttgcattgcatctgaatttgcattgatatggagtgaactgattgagtcgtactattttcttttctatttttttgctttacttaataaactgttcttgaaactgtacttggaaagaaaataaaagtgaagcagacctgcaggggtgtgtacatttactatcttactgcccatttgaagcatcttcactagcagttggtgtagcaccatctttgctattttgggtatagactgaatgtgggctgtgtgttggaaaccaacctgatgagtctttactaagcacttcttattggacaccctggtcagagagcctcaagtcatcaatccttcacagatgaatacagcagttatgaactacagttggaaacgtctttatattttttttctatatgactttatgaaacaagaccaaaaacagagcttgtcttagagtttgcctttgaatctttttttatttggggacttgagtccagacttatttactgggtctctttcttggtcaactttccagcatcttcctttttttgtattatccttgctggtatcatgaagcctgaacagcagttgctgctactgtcacctttccaagaaattgggcagagggagtactgacgatacatatactgatagtgaggccaactagactggatgtaagatttgaagggaggtgtgaaagaaaagaaggaagcaaggatgtccctagagtttggggcctgagcaactgcaagacagaatctactgagcaagcaataggaaagaatgcttggagagagaaggctcaggagcctaggtcaggacatgtgacatttgaggggcctattaggtacgcaaatggactctcacagaagcagcagggaggagagggctgaagacataaaagtagaagttatgaagtatttagcaccatgagatgggacaagatcacccaaaaagtagttaggaaaaactagagatgtgagaaccagtgaggtctgagggatgcaagggaacatggtataatgaacgtgaagtgagtattgcaaaaaggggtaagaggcaagtgtgttaacctgagaactaatattatcattggattctgctttgaagatcgtaacaagggcagattagagcatagtagagcagcagaggaaacttggggagagtggattcaagaatgaatgggcaggctgggcacggtgggtcacacctgtaatcccagcactttgggaggcagaggtgggtggatcacttgaggctaggagtttgagaccagcctggacaacatggtgaaaccctgtctctactaaaaatacaaaaattatctgggcatggtgccatgctcctgttattccagctacccaggaggctgaggcagaagaatcgcttgaacccgggaggcggaggttgcagtgagctgagatcatgccactgcactccagcctggctaacagagcaaggctccatctcaaaaaagaatcaatgggcagaggaattaattgtaagggccagaacagacagtgcttttgatgagtgttgcagaaagaagagaaatggggcagaatctgaagaggaaagtgcaattatgaggagtttttcttcacatggaaggtctgtttgccaccaggaaagatgccaggaattggggaagaaaagtaggaggtgaggaaaggaataagagagggaaggaatgagaggagagaggaatgttgaaacagtatctgcaggtaaattgagaagggaaagctaactaaacttccctggagtttatttcactgggtgacaacacaagcattcaccgagcaagtaacaaccccatttaatcagatgagaaaacaggctcacatgggataggtcacttgtctaagatcccacagattttaaaagacatagtaaaatgtgtttttttgactgctatcagtgatcctttcactctataatgcttttcccatgcaaaagacccattgttatcaggacagcagttagcaggagcaataagagtgactctataacatcgaagccctttcctgtatgagtggacagggaagcagacagcataggaagtgtttggtgcagggaatgcagaacataggagcaagtgagacggtattctgagagtaaagttcatctcatcattagggtttgtccattgctctttgacaacagccctaaaatggtttgggaaaagatcctgatgagccaaataatgtaaaccttaaaagcactggtctgtaaactttaacagatattggaataaactggaaaaataattataaatgtatatgcttacactatgcagccataaaaaggaatgaggaagatttctttacatatttatagaattatcttcaaaacacacgactaagagataaaagcaactgtgtgtgtgtgctgtatgtgtgtgtgcgcatgtctgtctgtctgtctgtcttccctggagacaaacattatacaaatgctgtgatggttaattttatgtgttacctcgatagcaacatgtggtagtcagattaaacattatttctgagtgtgtctgtatgggtgtttctggatgagatttgcatgtaaataggcagtctgggtaaagcagattgccctcccaatgtggtaggcaacatccaatccactgaggtcctgaataaaccaaaaaggtggagaaagggataacttgctttctccacctgagtgttagagctggaacatggatctactcctgctctcagactgggaagtacaccattggctccctggttctcaggtctttagactcaaactgaattacaccattggctttcccagatctccagcttgcagacagctgatactgggaattctcagcctccacagtcatgtgagacaagtccttataataaatgtcttcatttattatttacatgtacatttacatgtgtatttgtctctctttatataaatatacatatatacccacatatgtgtgtgtatatataccctattggatctgtttcatgagcaaaccctagtacacatgcacatatactacatatatacacacacatacacactccctcaaaggagcgtatatatagtatatagagttgatagagctgccttttggatacgaatggggaaggaaagatgaacacaaatacacatataaatttacttatatttggggaaaaaataccctgtgggaggagaaaccaaaaaactaatacaaaaaagaatgacctataaaaaggaaggaagagtcagggtgaaaaggacgggcatgttaagacagacttccctgagcataccttccttctgttgtatagttttgatttgggaaacatatgttttacatactcaaaaattaaattaagttgaaaataaaaaagacaatccctaaaaattgaaaataaactgaaaaaatgaacctccctatatatatattaagttggtggcaaaaccacacagaattaaatgaattctttccaataactttagaatacagtattttaactatatatactttgtggaacacagtctaagtacaacagaactaaaaagaaatcttaaacttcattcagtatctaattgttggcagcaataaaggtgttactattttggatatatcctacacatggcaaatatgtaatactgtgaatgttgctggtaaccaggattttcaatgaaagagcggagatagaaaaatcaaaacaataaaattactttggatttaactgtgtcaatttatctttacatttgaaatatcagcatgaatggaaaattttttctctaatgaattgaaaaggcatcagctaggtgcggtagctcacacttgtagttccagcactttgggaggccaatgtggcgggatcatttgagcccagaagtttaagaccagcctgggaaacacagggaaaccccatctttacaaaaaatttaaaaatttagccagccatggtggtgtgtgcttgtggtcccagcaactccggaggctgaggcaggaggaccacttgagcccaggcggttgaggctgcattgagccatgattgtaccactacacttcagcctggacaacagggcaaaaccctaactcaaaataataataataaataaagagaagagaaaaacaaaaggtctcaaagtagtgacaactcaaaagaaggaaacatacctaatccccagattgtggtctataaatacaactgcctactaaaaagaagggctccagaaagaaaggtcggattacccacaaagggaagcccatcagactaacagtgaatctctctgcagaaaccttaaaagccagaagagagtaggggccaatattcaacattcttaaagaaaataattttcaacccagaatttcatatccagccaaactaagcttcataagtgaaggagaaataaaatactttacagacaagcaaattctgagggatatcgtcaccaccaggccggccttacaagaactcctgaaggaagcactaaatatagaaaggaaaaactggtactagccactgcaaaaacaaaccaaaatgtaaaaaccatcgacactatgaagaaactgcatcaactaatgggcaaaataaatggcaagcatcataatgacaggatcaaattcacacataacaatattaaccttaaacgggctaaatgccccaattcaaaggcacagactggcaaatgggataaagagtcaagacccgtcggtgtgctatattcaggtgacccatctcacatgcaaagacacacaggctcaaaataaagggatggaggaatatttgccaagcaaatggaaagcaaaaaaaaggcagggggtgcaatcctagtctctgataaaacagactttaaaccaacagagatccaaaaagacaaagaagggcattatataatgataaagggatcaatccgacaagaagagctagctatcctaaatacatatggagcccatacaggagtacccagattcataaagcaagttcttagagacctacaaagagactcagactcccacacaataatagtgggagactttaacaccccactgtccatattagacagatcaaagagacagaaaattaacaaggatattcagaacttgaagtcagctctgtaccaagcagaactaatagacagctatagaactctccaccccaaatcaaaagaatataccttcttctcagcaccacatagcacttattctaaaatcgaccacataattggaagtaaaacactcctcagcaaatgtaaaagaatggaaatcaaaacagtctctcagaccacagtgcaatcaaagtagaactcaggatcaagaaattcactcaaaaccacacaactacatggaaactgaacaacctgctcctgaatgactactgggtaaataacaaaattaaggcagaaataaataagttctttgaaacaaatgagaacaaagacacaacgtaccagaatctctggggcacagctaaagcagtgtttagagggaaatttatagcactaaatgcccataggaaaaggcgggaaagatctaaaattgacactccatcacaattaaaagaactagagaagcaagagcaaacacattcgaaagctagcagaagacaagaaataactaagatcagagcagaactgaaggagacacagacacaaaatacccttcaaaaaaaatcaatgaatccaggagctggttttttgaaaagattaaccaaatagatagaccactagccagactaataaagaagaaaagagagaagaatcaaatagatgcaataaaaaatgaaaaaggggagatcaccactgatcccacagaaatacaaactaccatcagagaatattataaacacttccacacaaataaactagaaaatctagaagaaatggataaattcctggacacatacatcctcccaagactaaattaggaagaagttgaatccctgaatagatcaataacaagttctgaaattgaggcagtaattaatagcctactaaccaaaaaaagtccaggaccagatggattcacagccaaattctaccagaggtacaaagaggagctggtaccattccttctgaaactattccaaacaatagaaaaagagggactcctccctaactcattttatgaggctagcatcatcctaataccaaaatctggcagagacacaacaaaaaaagaaaattgcaggccaatatccctgatgaacatttatatgaaaatcctcaataaaatactggcaaaccaaatccagctgcacattaaaaagcttatctactataatcaagtcggcttcatccctgggatgcaaggctggttcaacatacgtgataatcaataaacgtaattcatcacataaacagaaccaatgacaaaaaccacatgattagctcaatagatgcagaaaaggcctttgataaaattcaacatcccttcatggtaaaaacactcaataaaccaggtattcatggaacgtatctcaaaaagaataagagctatttacgacaaacggacagccaatatcatactaaatgggcaaaaactggaagcattccctttgaaaaccagcacaagacaaggatgccctctctcaccactcctattcaaaatagtattggaagttctggccagggcaatcaggcaagagaaagaaataaagggtatttaaatggaagagaggaagtcaaatgatctctgtttgcacatgacatgattgcatatttagaaaaccccatcgtctcagcccaaaacctccttaagctgataagcaacttcagcaatgtctcaggatacaaaattcttgtgcaaaaatcacaaacatgcctatacaccaataaaagacagagagccagatcatgagcaaactcccattcacaattgctacaaaaagaataaaatacctaggaatacaacttacaagggatgtgaaggacctcttcaaggagaactacaaaccgctgctcaagaaaataagagaggacacaaacaaatggaaaaacattccatgcccatggataggaagaatcaatatcgtgaaaatggccacactgaccaaagtaatttatagattcaatgctattcccatcaaactaccattgacttccttcacagaattagaaaaaactactttaaatttcacatggaaacaaaaaagagcccgtatagccaacacaatcctaagcaacaagaacaaagctggaggcatcatgctacctgacttcaaactacactataaggctgcagtaaccaaaacagcatggtactagtaccaaaacagatatatagaccaatgggacagaatagaagcctcagaaataacaccacacatctacaaccatctgatctttgacaaacctgacaaaaacaagaaacggggaaaggattctctatttaataaatggtgttgggaaaactggctaaccatatgcagaaaactgaaactggatcccttccttacactgtatacaaaaattaactcaggatggtaaagatttaaatgtaagatataaaaccataaaaaccctagaagaaaacctaggcaataccattcagacataggcatatgcaaagacttcatgattaaaataccaaaagcaatggcaacaaaagccaaaattgacaaatgggatctaattaaactaaagagcttctgcacagcgaaagaaactatcatcagagtgaacaggcaacctacagaatgggagaaaaattttgcaatttatccatctgacaaaggactaacatccagaatctacaaggaacttaaatatatttacaagataaaaacaaccccatcaaaaagtgggtaaagatatgaacagacacttctgaaaaaaagacatttatcatccaacaaacatatgaaaaaaagctcatcatcactggtcattagagaaatggaaatcaacaccacagtgagataccatctcacgccagttagaatggagattattaaaagtcaggaaacaacagatgctggagaggatgtggagaaataggaacgcttttacattgctggtgggagtgtaaatcacttcaaccattgtggaagtcagtgtggtgattcctcaagaatctagaactagaaataccatttgacctagcaatctcattactgggtatatacccaaaggattacaaatcattctgctataaaaacacatgcacacgtatgtttatggcagtactattcacaatagcagacttggaaccaacctaaatgctcgtcaatgacagactggataaagaaaatgtggcatatatacaccatagaatactatgcagccacaagaaagaatgagttcatgtcctttgcagggacatggatgaagatggaaaccaccattctcagcaaactaacataggaacagcaaaccaaacaccgcatgttcgcactcataagtggtagtcgaacaatgagaacatatgcgcacaaggagggaaacatcacacactggggcctgtcggggggtggggagcaaggggagggatagcattaggagaaatacctaatgtagatgctgggttgatgggtgcagcaaaccaccatggcacatgtatacctatgtaataaacctgcacgttctgcacatgtatcccagaacttaaaatataataataattaaaaaagggggagattcaagcagagcaactgattccaggttcagggcaggaaatatataaaataacaacctattttgccagaaacaaggaagctaccaaaaatcaatggatcatatcaaaaaggacaaaagagataatataaaagggttcctactggccaaagatgagatattgcaattaaaacacaaacatataaaaacctgtaagttcataataatcaatacaaaaaagaccccaattcccccaccctacaaaacacaactcactgaagttacaacagcaccaactccttatgctgagaattggctcagaccaaataagtaattacattgactctcatctctaagcatacatctcacagcctgcctctctaattgcatgtttaacagggaggtcaatattctaatgtcctaaagaactcttaattttgcttccaaacctactcttcccccaacattccctatctcatttgcttatatcgccattccccatatttcatatctaatccatcaataaaatcccaaatccaaccacttcttaccattcaactctagtcttgccatcaccttttacacagattactgcagcacagtcctaatttccctttcttccactgtcacccacttcatcccattctctcaaatcagccaggcaaaacctttcaaaatgtaatgcagatcatgctattcccatgctcaaaaccctccaatgacttctactactctcaaaatacaattctacaacatctacataacctggccctgggatacattttatacttctttcactctcctatcaaccctctctactagctggtctctttgctgcttctcaaacatgccaagcaccctcccctctcaggctctttgcacctgttatcccctctattcttctctattgagaaggctcaatccctagggtctcccatggcttactccttcattcaagtctttgcccaaatgtcacttttcagagagatcttccctgaccactttatcgaccatagcactttaataaatataacaacctacctctatatcatctatatatatcttttgtttacattatctgtttgctatataaaagcacactgtttagaacagtgcctggcacatagttggtgtcaatatatatttgttaaatgagttaccaaatctgaaattaatctatatttttcaagtatcaaggttgtctcagatttgtagcagaaggccattttaccttaccatatatcatttatttcagactaagttactctaaaatttctgacaattaagttctttcatcagttatcttctttcaccttttgcttattccagactgaagatctcaaaacctttacatcagattgcaagagaagtcttactttactctcaaaaaccttcattaaaatctctgaatctcactgtatttactaggaagcaactcactgacaatcatggcacaattatgccacaatcaatgggaaagttgggtactatatctcctaacatttttgtcttagtccattttatgcttctagaacagaattacctgagactgagtaattcattttaaaaatttacttcctcactgttgtgggatttggaagtccaagatcaaggcactgacattgagggctttcttgctgggttgtcccatgatggaaggcatcacatgggcaagggaaagagacggggaagaggaccaactcatcctttgataagaaacccactcctgagataaagaacccactcccacataccacatgcctgcgataaaagcattaatatgttcatctcttaaaggtccccacttcccaacaccgttgcaatagactaagtttccaacacatgaactttcaggacacattcaaactatagcagttttgcttcatgaattcctcatagctcagtacaagactgttttaatttaagcaactccacatcctgtacctctaattctgacagtggtaaagaagcagattctcaagtagctaggaaacagagcttacatttgatttcctttcctttaaaattttagatttatgttttaaacacctacagtctagatcaagcaaatcaaacaattaatccagcttatctttctacactaacaccaaacaaagaaagaggaaagaacagtatttgctctttcaggcattcactaagcagcatcatatgctgggaagaatatggaagaactgttggtattaagttggcccagtaacgatacttattcttattctgagaatatgatacgcaatggtaactcaaggttcaatataagaacagtaaaaagggaaaagtgttccaaaaactactcctcagtttaaaaaaaaagagtaagaggtaagcaaggccagtttttcataagtgtgggtatgggtgacgaagagcctctcatggaggttttatattcaccttatgttggccaaatatgagggctaaatgactagtctcaagggcaaagaatcttgcaaaggccatcagaacttctaagcaaagacataagcaaagttctcgtgcaaagctcaattttaaatattcttctctatgcatagaaagtttcatggtagagcagattgagcacaagccagaaagaactgggtcgaaatgctagttccaccactcattagctatatgactttgagcaaattatttaacctctctaattctccacctccctttataatatgggcagtgaaaatatttattttaaggtcttgtatgaagattaaataagaaaacaggtggaaattgttagcaccagatatggaaccctatatatgctcagtaactattcatttccttcatcctttggtccaaccatctaggaaaaaaaaaaaaaaaaaaacagcagagctactgctcacaaaatatttttattttaaaagttctttaagtaataaaagttgcccctctccaagcttccttgcctctctgcaaagatccctatcaaccagcaggcacaatctggagtctaccaggactaactgcattcttctctttattccgtgaatgtcagccttgaccaacagtcccggacacccaggttaccctttaccactcacgtctaatccctgagaggccctggactttgcctattctgtcaccatctcccagaaaccctccaactgtgttctctagaattcagtgtatagtgaccaaaatctcctcctcaatccttccataaaatatctcttcactttcttgctctaaccaatacctggctgtcccttgaggacaatgcttccactgtagacccctcttacgtgtagggatgagctttcctcttgcagtcctaggttgcaccaggcctataagcaggttgggtagatcccatattctccttcctaacccccacccattcaaatattcccatcatctgactataccactcagcatacctcttgtttctgtgatctaataaccctggattcccctctcaccccgtattttagctcttggctcgatgacactctctcaacttctatcttagttctcaatattttcaacatacttatccttcaatatactgatccttcaaacactaaggcctccaattacattaactcatctcctccgatggcctttctttcatccttcctcagccactcactcccatggtcacactctagactttacttgccattaccaaaaactcctttttctcaatttcatgcatctcactttatggccactatattctagtcttcctgttcagtccctcataaacacatcccaattgatcaacaaccttcaaccatgctgaaactcacaattcattaagcatgtcaccttctcaccatccctcattgcgtcctacccaatgtcctctctttgctccttgcccagactaaatctatagtctatcatcataattactcccttgcacgcccctgcacctacctccctggaacctcacctactctggattattcagtggccatgacctcaaccctagctacatccaacccttactacctgggcctgaacgactggccttatctgaaaaacatacagccacactaactggtctcactttaaatttcatgaccactaatcctcaggtaagcactcaagtgggtcctgcccagccatcatgctgttcctcacacattcaccctcccacttctagataactatgtagtatacgaatctctctccacaaactgccaatacctcaacctgcacctccatctcatctatttcctggaaaaaaatcaaagaaaccaaaagacaacctgtccccaaatctcaccactacatctacactctctctctactctagtctctatcttctcttctagctcagcatttctcaaaaattttaggtctcaggacctcttaacacagttataaattgttgaggtccccacagagcttttatttatgtggattatagctatcatatttaccatactagaaattaaaattgggaaatttagaaaatatttatttcattaaaaagtaactctattacatggtaatataaatatatttgtatgaaaaagaactatacctttttttttttaattgtagagacagggtctcgctatgttagccaggctggtctcaaactcctggcctcaagcgatcctcccgcctcagcctcccaaagtgctgggattacaggcatgagccagcacacccagccaaagaactatattttctaaaacagaaaatttagtgagaaaagcagttttatatctttacaaatctcttaaatgtctgactttaatggaaaacagctgcattcaatctgctgtaatatgttgttttggttgaagaatatgaaaggatttcagcctcacacagattcatagttagaaaagaaagaagtattttaatggcctttttagataactggggatgttcttctttgatacaacaccaaatcccaacaagtaaagtttcttaaagactagtggcaatgtgcaatctgaaactgtatcagtgaacttttctcctctctgttaccttaaaattcatgggtctatgagcacttttcaaactatctgttacccatgcataattttgtaacaccatgcacaccggtcaactgggaaaatactgtttctctatattatgcagatcatccaaatgttaggaaacttcattaaactatatttaaaagccacattcattaacatcaccaccaatgacatcagaaagtctttaagtattaggaagatgaaacatgaaaattttaaatctttcaaaaaagtcattctttcaaataagaatggtatcccgtatcctctagtagaagactagctcaactagcaattcaaaacaactgctcaagtacttttcctcagacaaccaccatactacattaaagagttctttatgcatacttgccatttaattactcagaattttaaaatgtaatcttgtgtaatcaagagcaagatttaataaaatcaatgattttgactgcttcttcaaggacattctgaagcagaatcagtatgacgaagatgatgaatgtgtaatgaagaaaataatgattgcttactctgtttggattggtgtctgtcttattctgttcaggttattataacaaaatatcctagtacttggtaatttataagtaacagaatttactgctcacagttctaggagttgggaagtccaagatcaaggcagcagcaggtctggtgtctggtaaaagctttctccttcatagatggtgccttcttgctccatcctcacatggcagaaggggcaaacagattccctcaagcctccttcacaaaggtactaatcctatctgtgagagcagagccctcatgacctaatcacctccccaaagttctacctcttcacactatcaccatgcaggttaggtttcaacatgaattttggagggacatcaatgttcagacaaaaccttatttgctgttaagacaccagaagttttacgcactattgcttttagaaacctcagctcaaatatcaacatggtgaaaaaggtagatcatgcttttactactgtgcaaatagttttgacctcctggacttctgaaaagttctcagggacttccaggagtccactggctacactttgaggtcaggtgttctggatgaactctccatgctcttacaagaggccaacctcctagacaatgctccagaatgtctttcctttctctcctacattgtcaatcttatctactctcaagtgagtctttcccattggcattcacctagaaaagaccctccttcaacctcccttttccctccagttatggccttatttctcacctttccttttcaataaaactctccaaaagaaggcttggattggtaagcaagaggagctgggtaagaggaggaggagcgctatctgtacatatgaatgagaagcaaaatcagcacccaatcagcaatcaaccctttctgaaattaaaaagaaaaagaaaacccaggcacctgacattcctagagattttctaatacatcagcaacataatacaaacctttttaaaaattctttttaatttactgcttgtagacagtgtctagccaccacattgcacaacccctcccctgccccatgatttcagacatcaaatattaacacaaagtgagtaatgcaaaaagaaagggggttaatcagacaccttgagagaaaggaaaaaataacactgattcaatgagagctgttaatgaggctttttgttttggtagattaatttgggagtctgatgactaagaagaaaatctaagcttctcaggtgactgctattgattattatcaaggtttctttttaatcgaagagatgctttcgccaaattctatagtttatgaattttagatgtttatctgaaatctatgtctaccctaatagtatagaaaactttcctcattagcaaattgaaagacctccccttattgattctgtattataacttgacagatgatgagcacttcaggctgtgaactgctgatgtttaaatatattaccctaatattctttaagtattgccaattgtaaacctcattaactcccagcatgtggccaaggcctggatttcatcacgacagcctcacaaaatgaaaacaggtatataaaaatgattttatcatcaacattattatatcctccttcaccttgtgaaatctttaaaaggccatatattctttcctcagaaaaagaatagcaaacataggaaaggcagagaacatgctttatttatataggccacatatttctaaactttagatttctttttcatcttttcttctttgatgcctttattcttcatgcatcaaaacaggaactgtcccaggactcaatctctttactctgaacagaaaggaattatctgaggccgggcatagtggctcacgtctgtaattccagcactttgggagggctgaggcaggtggatcacttgaggtcaggaattccagacaagcctgaccaacatggggagaccccgtctttactaaaaatacaaaaattagccgggtgtggtggtgcatgcctataatcgcagctactggggaggctgaagcaggagaattgcttgagcccagtaagggaggttgcagtgagctgagatcatcccactgtgctccagcctgagactctgtctcaaaaaaaaaaaaaaaaattaagggtttgattatattgctgtcattttggtacaacaaagtggcagggggctgacaaggcggtatggtgaatctgtcagcttcatcactagcaaactgagatatctaacattcccttttccaaaagaagtgccaacttctgtttgcacatggagtgcaaagaggttccacactggagatgaaagacatatgtgtggtaaattcctttgtgaccctagcaagccaactggatccctgagccacccggtgcccacctcacagacagtgcttggtacccgtaaccctcagtaagtcaggcactcaacacctccagcttattctagtcccatgtggtcttcccaggtgagaaggtcagtcacaagtgaagacagttctttagccttgactccctttaacgagataacagtcagtaacaacaacaaatagaacgtgtgcaaagatcaaaggaagaattttcaccttgctcttaacaggtaagttgtatgaacaatgtataaaaattatacttagaagatatacaaagctttattctcattttgaatgaaaaaataataatcacaaccaaatctaaaaggtacagttcagttacgtggtacagtaaggtctaggccctgagaagtccttagagtcccacctcctcctcaaatgctgggacaagccctcttcattcattaaggcccaccaaaaacaaaaggcttccagccctagacactcaaagtctcctctcatctcccttacggaacttcataaattgattaaatccatcattaagtagattaaaacagtggaatgcagggaggtctaaacacaacaaagagtattaacagcaagtatgctgttacacaggcaaatcgtgccaatcccctcattcaaattagcctttgatggctctccagcactctcaagataaagaaccccaatccttaatatgaggtacaagtccctacacagtctgggcacagcccacctctcccaccaccatgccctgcacttccatgctccaggcaagccagcctctgcatttcaaaacacaggacctttacaactgctgttccctctgcctgcaactctctgtcctctgtactcccacctccaactcctgcaactcagatgtcactcatggaaagtcttcccaatttcccagtccaaatgaagcccttatttggtgttactcacaccatctctctctttcatagcagtatcactacatcaattcacatttatttcaggctccctgatgaatacctgtctgctccattaaattagaagctccaagagggcaacaagcactgtgtttttttttccattcaccatgttatcctcaatatacacaactgtgccaagcacagagatgaggttcccaaagagctgctgaataactggagagtgttcagagagaagctccaacatggaaggctgaccaatgtacccaaggcactcatgcatcattccactagaaacaagagtgctacagaaaacaggatccctctctcagcaagctggaggtgttaaggccgtaagtgcacaggcatttaaattccctgcccagagttccatcccagcccacacataggtgaagtctttaggaagcagccatgccctcacagagacagttgacaacaggggtcactgactggaaaatgtctggatcaagccaaaactaccactagaaaaaggtttttttccggatcaggctggcccttggcaaagaaaattcttcacaactataagctttctaacgtcccggaaaaaacagctacatgagtgtattcatttcctggggctgctgtgacaaattacaacaggaaaataaaactggtacactgaagaggcatctgcacttacaggttcactgcagcattattcaccatagccaagatatgcaatcaactcaagtgcccattacagatgaacggatgaagaaaatgtgatacatgcacacaatggaatactattaagcctttaaaaaggcaatcctctcacttgtgacaatatggatgaacctgaaggacaatatgttaagtgaaataagccaggcacagaaagacaaatactacatgatctcacttacacatggaatctaaaaaagtcaaactcatagaaacagagagcagactggtggttgccagggcctcccttgggggaaggggacagtatggggaaaggccctggagtgatgttggtccaacaatataaaattttagttagaggagtaagctcaagagacctattgtacaacatattgactatacttaataatcatatattgtatacttgaaaattgctaagagtagattttaagtgttctcaatacaaaaagaaataagtatatcaggtaatggacatgctaattagcttgctttagccattctacaatgtatacatatttcaaaacatcatgttgcatatcataaatatattcaacttttgtcaattagaaaatataaatagctggggctgagtgcggtggctcacacctataatcccagcactttgggaggccaaggcaggtgggctgcttgagatcagaagttcgagaccagcctggccaacatggtaaaacactgtctctactaaaaatacaaaaattagtagggcacggtggcggacccctgtaatcccagctactcaggaggctgaggcaggagaatcacttgaactaggaggcagaggttgcaatgatctgagatcgtgccactgcaccccagcctgggcaacagagcaagactccatctccaaaaaaaaaaaaaagagaaatataaatacctgatttcagtggcacatgcctgtaatccctgctactccagaagctaaagcaggaggatagcctgagcctaggaatttgagatcagcctgggcaacagagcaagaccctttgtctaaaaataaaataaaatataagtataaataaataaacaaaacaaattcccataataacacaacaaaatttatgctatcacagttctagggatgagaagccctaaatcaagagttcagtacggccacagactctccaaaggctcttgcggaaaatcccctcttgcctcttccagcatctggtgactccaggcattcctcggtttatggctgcaacgctccaacctctacttctgtggtcaccccgtctcttcctcttccctgtttctgtgtcaactctccctttgcctctatcttctaatgacatttgtgatggaatttagagcccacctaaacaatccagagtaatatcttcatctcaaaattcttgatttaatgacatctgcaaagaccctttttccaaataaggtaacatttacaaattccagggattaggaatagatctctttgggtggccattattcagcctgttaaggtgagtaacagaattcaaaatacagcttctattcccgggctttcgtaaaaatgcttcttagtacacttaactaaatttagtcaacaaattgatataaaaccctcatttgattattacacattatatacatgtactgaactaacactctgtatctaatatgtacaattactacacgccaactagaaatgaaaggaaaaaaataactgagatgttcacagtttttgcaactaaaaggtttgttatagggcaaaggattaaggccatctaacattttctgtgtcacagtaaaacactgagatttaagataatacaaaatctaaaagaaaatgtcaaaagaggactgtgagattatgagaagaggcagctcagaacactgaaaaggccaaggaatttaaaacctgacaggcctgagcaccttttagctacaaactgcttaaataccaagagcttcagttatctcatcgataaaaccaagaaaacaaagtcggcctttcaaatctgtcacaagcttttgagaaaatacacacattatgttatactatatatgtaaaatatatattacacattgttatctgataaatgtaaggctgtatttttggatattatatgtttaaaaaaagaaaaagcatgtctattaatgggaagggggataaaatagaacacaaagcacatcagaaggtattccaatttattttattattttattttatttattttattttattttatttttgagacagagtcttgctctgtcacccaagctggagtgcaatggtgtgatcttggctcactgcagcctccagctcctgggttcaagcgattctcttgcctcagcctcccgagtagctaggattacaggttacggccaccatgcctggctaatttttttgtatttttagtagagatggggtttcaccatgttggccaggctggtctcgaactcctgatctcaggtgatccgcctgcctcggcatcccaaagtgctgggattacaggcgtaagccaccacgctcagcctatttattcatttattttttaaacatttttgctctttcttataccttcagaggtcttccaattctatcaaataaaggcccataaacatattaatgtatgtagcaaccaaaattttcgcagagagagacacaaaatttaaaaaacaaagaaaaatcctgtaatgttaaatttaaaaggagatgttattatgaactttcaattttttaaagtttatatatttcccagctcttttcactgaaaagtcagagaagcagtaacaccctggtaacaataagccagtgcccagagctttgttcctaagcaccattcctaaataaaaggaatcagagcttcttgttggggggaaaagtgatttccaggtcaaaggcaggaacggtccaaggtgagcctggaacaactaatttgccaaaagcaaggagcacctgaaagctgagaatgagaagccagcttgaggcccagccctcccactgaccagttatgagacgctttgcctgtaagggcatactggtaatggagtataatacagaattaaagtatgcaaatccagtaatttatgttgataaaaaagattaaaagacaaagaaaagggggaagaggaaagaaagtttctgtttaccaaggaatgttggacaatatatacaggagaaattataggattagaaaaatcgccaccttttaaacatcaatagaataaccggttcagcaaagaatcatcatggatgctaaaaccatcaggtgaaaggttgctggagaaaatatccatgtgatcttgacatatcatcccacaaattatctactcatataacaacaaaatgtagcctttacaatggaaatatcaggtggatgccagcttcaccaacttatcaaacagcatcaccaacacctggacacgatccctcctgaggagatacaatgggtagtatagaatagctcctaacctataccccagaatttatcctgaattgaatcagacaatgaggaaacaatcagacaagtccagaatgcaggaccttcaaccaaataactcgcctggatttcaaaagtcaatatcacgaaaaacaatatagtatttctgttctgttttagagtaaaagagacataactaactgcagtataatcttcaatcaaaaaacaaaaaaagaaagaaacaagaataggcaaagagccatttgaggttgggaagggaggtgaacacaccagatctgcaaatatacttgaaagttctagtatatttaaatatggaatagacattagctgatacttgacatgatcattaattctcctaagtgcaataatagcatggggggttatgtaggagaatgttcttagtctcagaagataaatgctgaaatattgtgatgtgtacaatttacacttaagtgttccaaccataaaaagaaattatgtgtgtacgtgtttgtgtgtagaaaatgtgtgtgtacaaagacagcacaaagatggtaaaaattttaataaaaagtcaatctaggtgaagggtatagattgtgtgctcaccatattcttctctcaacttttttgtgactcagatttttttttctgtagtttaaaatttttccaaattacaaaaaactgatctcaaatattaaggcagataatccatgttgcatgtgaacttggtcacacttcctctgaaacatgagccattctaggaggtgaaaaaacaactagattttccacagaaaaatgcttgctggcataagtctgtgttttgcatagtttcagcttaaatgaactagtgtgaaatatagcccagccttttcctgcaccaccctgctcatacattacattttcctaccaagcaaagaatcccccttggggttagggtagaaaacaaaggtaagaaggttaaaaaggaaaccttctgccgctggaacagagagagaaggcataatccaacaatcctccagaatactgcaacaagtagatcacctaattccctgcctgctccctcccagtcatcaaggccttcattttacaggaggttctttccattaaaaaaaaaaaaatggtatctcattatggttatgatttgcatttctctgatggccagtgatgatgagtattttttcatgtgtcttttggctacataaatgtcttcttttgagaagtgtctgttcatatccttcgcccacttgttgatggcgctgtttgtttttttcttgtagatttgtttgagttcattgtagattctggatattagccctttgtcagatgagtagattgaaaaaattttctcccattctgtaggttgcctgttcactctgatggtagtttcttttgctgtgcagaggctctttagtttgattagatcccatttgtcaattttggcttttgttgccattgcttttggtgttttagacatgaagtccttgcacatgcctatgtcctgaatggtattgcctaggttttcttctagggtttttatggttttaggtctaacatttaagtctttaatccatcttgaattaatttttgtataaggtgtaaggaagggatccagtttcagctttctacatatggctagccagttttcccagcaccatttactaaatagggaatcctttcgccatttcttgtttttgtcaggtttgtcaaagatcagatggttgtagatatgcagcattatttctgggggctctgttctgttccattggtctatatctctgttttggtaccagtaccatgctgttttggttactgtagccttgtagtatagtttgaagtcaggtagcatgatgcctccagctttgttcttttggtttaggattgacttggcaatgtgggctctttttcgattccatatgaactttaaagtagttttttccaattctgtgaagaaagtcattggtagcttgatggggatggcattgaatctatatattaccttgtatggccattttcacgacattgattcttcctacccatgagcatggaatgttcttccatttgtttgtatcctcttttatttcattgagcagtggtttgtagttcagttagaatggcgatcattaaaaagtcaggaaacaacaggtgctggagaggatgtggagaaataggaacacttttacactgttggtgagactgtaaactagttcaaccattgtggaagtcagtgtggcaattcctcagggatcttgaactagaaataccatttgacccagcaatcccattactgggtatatacccaaaggattataaatcatgctgctataaagacacatgcacacgtatgtttattgtggcactattcacaatagcaaagacttggaatcaacccaaatgtccatcaatgatagactggattaagaaaatgtggcacatatacaccatggaatactatgcagccataaaaaatgatgaattcatgtcctttgcagggacatggatgaagctggaaaccatcattctcagcaaactatcacaaggacaaaaaaaccaaacactgcatgttctcactcatagatgggaattgaacaatgagaacacatggacacaggaaggggaacatcacacactggggcttgttgtggggtcgggggagtggggagggatagcattaggagatatacctaatgttaaacgacgagttgacgggtgcagcacaccaacatggcacatgtatacatacgtaactaacccgcacattgtgcacatgtaccctaaaacttaaagtataataaaaaaattgggtgacaagtgcataaataagaaaaggaaagtgctagtgaaaactgagagtattcgaagtacataaagacattatacatgggttatatctcaaactgctgcatgtgggaaaatcagacacatgaagattccaataaatagagaaaattcagagctagagaactccacctcagagtgataggtaactgcaatctgtcaaaagggtgctggcaagcagcagggacagaagcaaagtctcctacagtttacctagagaaggaagaaggcaaggtcctttacagtttacctagagaaggttagttcttgtacattatactttggctattagcagacattggtgtttgattagcaagagttcagagtccaaaattcttcgtgtaatggtaaaagccattgcaatcttatacagcttaaggaaaacccatttttaaaatgtaagcagaaggccagataaagtggcttacacctgtaatcccaacactttgggaggtagaggcaagcggatggcttgagcccaggagtttgagaccagcctgggcaatacggcaaaatcccgtctctacaaaaaaatacaaaaattagctgggcatggtggcgcacggctttgataccagctactcaggaggctgaggtgagaggatagcttgtacctgggagacagaagttgcactgagccaagatcatgccactgtactccagcccgagcaacagagtgagaacctgcctcaaaagaaggagggaaaaaagttccaacaaaatggaagcagagaagactggtagggaaaaaaagaatccaaaggcattctgcaacgtgtcctatttgattctatatggtacagtttctttcctctagcttttgcagagtgcctttcttggggctttggaatcacctgtgaatttttaaaggcgatttgctcagaaagaaagattatagaaaagtaacgttcatagagctatgttgtacatttactcacaattttacagctgccttgaaaaataccaaaggcatataaatactctcatacatctgcacatcaccaccttgttgacaataatagttctctgatacgataaagcattctttaaaagagtcaaatatatacatattgaatccccaacttgaaacaatgattgaaggaactacattattactcaaataatgtaataataatagtagtaagtacagaaaatggtcctaagagatgggaaggtatacatttaatgacttcctggtcattagagcaaaagaaagctgtttcaaacaaaaagaattaaataaaataattaaaaataaacatacccatctttggtctgatccaccactccacttaaaagttccacagtctttggattaggctggctttctccaaaaatgttcaagtatcgagtgacaaagtcattgggggacatgaaaaattcaccgtttttctcaatgcttgcatactgtttaaaaaaaagaaaaacagtattttatatatttgattttcaacagtatataatcatgagagtgatatgtgaaaaagttgaaaatatccaaacgataaaatatcagatatgatcatgtacgcttcataatgaccattatctcccaacagttcaaagaaaaaacaagtcaagttttatgtttataaacttaactgggagcaatgttttcccacagggacacttggcaatatctgatggcaattaagattgtcataacatgtgaggaagggtgctactggctccagcaggtagaggccagggatgttgctagacatccaacaatacacaggatgactccctgcaacagacagttctccagcccaaagtgtgggcagtgtccaggttcagaaaccctggtttatagaaatttggaaagacaaactatgtcttgttttttagcaaaggcacatagctttttaaaaaaaaaaaaaaagtggaattacgaagtcatggaggcaaacaacctaattcctttgccccattcctgctttaagagcatcaatgatacaagaaaggatggcaaacaagctaagctggacagcaaactactaagtgcgtgtcatcttgggcaatcttatggagggaggcagtaaatgctgctctagttactgtcctctccattctaaggcattaccatgcagaaatgctcagtaagaattaggtggcaaacaacgcttcctcacagtgttctcctaggtctggcctttaatgtgatacactccagcctggataagagagagcccattaatttctgttgcatggagccctaagggcagaaatgctgagaaacgacatgggatcatgtggtgtccttatgaagcaggagacggcctcttgatcctggggacaaagcagtggtttggggactgaggaggcaaggatagtgcatctacaagaacaagcctagctgggtgataagaaccacactggtagccatagtgatggagggtgcgcagtgaagtgccagggcagtgtctcccctctctctctaatctgagttaaacctgattaaaactgtttttaaaagtcacttgttatttctacattttaattccaatgcagactaaggctttgctcagatactcagtagtaatatgctttggcatcccacgggtctggactgtgcctcttaccacttgaatggcctcaggtaagtaactaaagcttttggtacctctggttcctcatttgcaaaatgaatagaataacattacagcttcataagactgatgctagaaatatttaaatgagatactcatgtcatatacttagcacaacgccctatacacaataagtactttatattaaataaatgttctatagtattgtcttacagttaacattttttttagcacactacaagggaaaggctcaaagatgccccagtgatcctactattcttcagttagcatttaattcggctttttggacatgtaaagaattatattttgattttcctaactgagccaaaacaagatgaaaatataaaggaaatatcactgctaattacagcaatcttatgacttagtaattatacctaagtttgcccctgatagtgaataatttattttactatacaatttaacttttctcctaccagtagacatttccagttttttgtatttttaaataaagctaaggtagtaagctttgaatataacatttgtccaaattcctggcaattttcaaaggctaggctcccagaagagaaattgttgagtcaaaggagaggaacttctgggctcttggtacttattatcacactgctctccggaaaagattgtaccaatttacactcccaccaacagtgtgtgaacatgccctttactcactttggtctattatatttgttgcaaatatttttccagtttgatatttttatataattgagtgtatagaatttttttctcctttgaaatttcttccattacttttctaagcttagacactagctgtattagtctgttcttacactgctaataaagacatacctgcgactgggtaatttataaataaaaagaggtttaatggactcacagttccacatggctgggaggcctcacaatcatggtggaaggcgaatgaggagcaaagtcacatcttaacatggcggtaggcaagagagcttgtgcaggggaactcccatttataaaaccatcagatctcatgagacttattcactactacgagaacagtatgagggaaaccacccccatgactcaatgatctccacctggctccaccctttaaatgtggggattattacaatttaaggtgaaatttgggtggggacacagccaagccatatcaccagtctttcttcatttcaagactaaatatcagagagtttatctgagtttttttaaagtaggtttatcttttacctttaagttttagtacattagtactttatctttgtgtgtgatctaaggtaagaatcccccaactttaatttttccacttaatctcttggttgtcccacgaacacaaagcaaatcattctctcttccaggtctttaggatgccatgtttatcacatacttaattatcatatggtcaccagggaaaggcgtgacaaaatggctccatctgcagtaccagttctgatgaactggcaaaggcttcctagggccaacatgtattctgaggctgacctacgctccatgggagaatgctgggatcgaatgacagctcttgtcatcactgcagtcagagatgtttcaggaccatccttttcaattgtctcgtctactcttgcaagattacatgctataactagagggaaagttctgttaggacagaattttttttctctcatttttactgctgtgtcctcaaattcccagactagtacctggtagatagtgaaacatgttcaaataaatatttttttaaaagaatgaaaggtttaaaaaagacattgaattattttacacttggaaatttttttggccatgatcactccttgattttccacaaatgacctttagaatcattatcaagttgctgctccctaaaaaaattccactgaaatgcaaaataaaacaatgcaaggcagggcacactgactcatgcctgtcatcccagcactttgggaagccaaggtgggcagatcgcttgagcccaggagttcaagaccagcctgggcaagatggcggaactccatctctacaaaaaataaaaaattaaccaggtagggtaacgtgcacctgtagtcccagctacttgggagactgaggcaggagaatcgcttgagcacaaaagattgaggctgcagtgagccatgtttgcatcactatactccagcctgggcaacaaagtgagaccctgtctcaaaacataaaacaaaaagcctacaatgcaataccatgccatacccccaagataacgaaaaagaataataagtgatggcaaaaatgtggagcaaatgttactctcacacactgatggtatgagaataaaggagtaaaccattttagaaaaatgctgggcagtatctgctatagctgaacatacaaccacaagcccaccaatttcaatcagaagtatatcaccaacagaagtgtgcatatacacaaaaactatgtgaaaatgcccacagcggcattatttgtagtatccaaaaaactaaaaataacacaaatgtcaaccaatagtaggatacattaatggcttgtggtgaattcacacaatggaatacaacacagcaatgagaaaaaactaactccagctgggcacggcatctcacatctgtaatcccagcactttgggaagccaaggcaggtggatcacctaaggtcaggcgcttgagaccagcctggccaacatggtgaaaccccgtctgtactaaaaatacaaaaattacccaggcatggtggcacaggcctgtaatcccagctactcaagaggctgaggcaggagaatcgcttgaacccgggaggcagaagttgcagtgagctgagaccgccccattgcactccagcctgggcaacaagtgcaaaactccatctcaaaaaaaaaaaaaaaaaagaataaactaactccaactacatatgacaacagacgaatcctaagggtaaaagaaaagaaacataagaaaacctagcgtataattccattcacgcaaagtgaaataaacaggcaaaacttacatacagttagttttaacatacagtgaccagaattcagacaactggttacccttggtgggtgctgatcagaaggggcatcagagggcctctgggatgctcgttacatgggcctactcactttctgagtattcatggctgtacatttgtgatgtatgcattcaatttatatttcaacagtttacattttagaagtctttgagagatattatcagcttcatttttttagatgcaataaagaaatcatttcttaaatataagagcatgttaatctgggcacagaaatagttttctccagtttttaaaacaagctcatcaccacggctgggcagtctgctctgtgatttaagtaaacatgtcaaaggttgctccttaggattgatggacagaggcagaccataataaaaatatgtatgagggtagtgataaatgcagctctgctctccctgcagcagtgagcagagggtccctatagggggaacggactatatccttatatccaccacatctttaaaatgtcattaatccttctttgggaatatttttcactagtgagctgaagccttcctcccttgcaattttcaggagttttattatgattaaacatacacctgcaaaatgggaagagttttaggattcctcatgcaaccttgtataatacttattgtcatcaccaagaaataccaccatactcagtgaagatgacagcaaaggaaaccagaaggaacctatcactacaaatgcccataccccgagggcaggggtcctatctggcctgctcaccatcagtcacagtaaattgataaaggtttgtaagctgtgaatgagccagggtagaaccataatcatccagctacccattttgtcatgaatcactcatatcctgggactgaaggacaaatcccctacattgttttccaaccactgagaaggtgcacacaacaggtcactgcatctgcccatcctttactttgattccctgttatagggatggaacaaaatataatttaaggatttgcatctggattgggtattttatattagggaattatcattaactttattaggtgcacaatggtattatgactgtgtaggagattgtttttattatttgaagctctatgctaaattatttagggtgaattatagtgatagctaagttatatttattaacataaatcagaaaaaaatgtataaactaacatgacaagtattactttaaatcagatggtggttatgtgggtgtttactattctattttctgtatgtctgaaaattgtcacaataaagttaaaaacatatttaagaaacataaatggccaataaacatattgctctatttatttaaaaatgaaaattttaaataagatacaatttttcaaccaacagattggcataaagtcttttttgttgctgctgcaacaaaaactcataataatctgagttgatataatgtaggaaatgaacacttccgtgttcccacccaaaataaatattgaaataaccttcatgagaggcagtctaccaaggggaatcacaagccttaatatgttctaaacccattctaacccaatggtgccacttctaggaatttatcctaagaaaataatgctagctatatgcaaaaatgtaggtacaatactatcattacagtgctgtcatgatagtaaagcacaggaaacaactaaatattcaataattaaatagtgcttcaataagttagggcaaaacagaaacagccatatgtaggaatattatgcagcattaaaaatattgtagtagggttcctttcagctggaaccaccatcttccagtaattcaccaaaatgggatgaacacaaagggaaagaggagaggcactcaatatatgttctgtaggccttttagaaaacatagagttgttcctttggccacatatatgcaaatctataagaaaggtgatattgtagacattaagggaatgagtactgttcaaaaaggaatgctttacaagtgttaccatggcaaaagtagaggagtctacaatgcccccagcatgctgttggcactgttgtaaacaacaagttaagggcaagactcttgctaagagaatcaatgtgtgtgctgggcacattaagcactctaagagctgagatagcttcctgaaatgcatgaagaaaaatgatcagaaaaagaaggtgtacctggtgtcagcctgctccacgcagagaagcacactttgtgagaactcacgggaaggagcttgcattgctggaagctatttcctatgacttcatggcaaataggtgtttaaaaaaaaaaaaaaaaaaaaaaaaagacctctggattgtaaaaatgtggtgtccactccctcaaagaaatatttaaagcaaattttaattgtgtcctaattaactgtataatgtctttactaatcaaatttaacgtattgcttaccaaaagatgtgaggtaacttactgcgcaagaaattactcaactggttagaagatggccagatattatttatgacatatttgtactggtttaaaagtagttcctctaaatcatcatggaagaaacaaaataatttacaaaaataaaaaaaatatagaagcacactgaattataggaaaaagtatttgtaacatagcaggtaagggaaaaaactagatagaaaacagtatttttttctcctaaggggaaaaaaaattatatacatacagagagacacatagactgagagataaataaatatataaatatctatcttcctacacaaagatcacaagttacttttgtttatgtatctgccttttaaattttcaatgcatataaaattgatgtgataaaaagtttccaaaaacagaattaactgtttttcaaaatttgcctacagacattttaaaagtggatatcatgcttttgctgacaaaacaattataaaaatccaagtgtaattcactatgttactctgtaatatgtcttctgtttctcattcagcccttttccccaattttcccatctttcgctacagagatttagttacttgagactatatacttctaaacagttgacatggtttggctgtgtccccgcccaaatctcaccttgaattgtaataatccccatgtgtccagggcggggccaggtggagataactgaatcatgggtgcggtctccccataagtttcagaagatccaatggttttataaatgggagttcccctgcacaagctctcttgcctgtcacaatataagacgagaatttgtttctcattcgccttccaccatgattgtgaggcctctctagccatgtggaactgtgagtcaattaaacctctttgcctgataaattacccagtctcaggtatgcctttattagcagcatgagaacagaacagactaatacaatagtacacatcatctcttttgctctccatagctactggctccctctcactttctctattactaatagtaggcatcatctcttttcctccctggagctactggctccctctcactttctctgttactaatacaatagcacgcatcatctcttttcctccctcgagctactggctccctctcactttctctattcttattactggcacctctctgcactcagaccgtattttctctctgctctctctcatccattataaaaaatcagccatcttaatcaaatattctttcaaagtgactctatcttgccattctccattcctcctgctgccgcaaccctaaggctgcctaacttgtggccttgctgcaccaatcaaatctcacacccatctcctcgtcaaaaaacctcgaatgcttcctactgtttagtggaattccaaacccccaattacctttccaatcctgtcacccacaccctgtgatactcagcatactttgagccagagttgtatttaaataaacacttaaaggatgagcaatactccttcaacctgcagaggttgttttctcctcaactcatctccaggccttccctcaaacgtgttccttgtcgcctctccaacttgtccctgagactccccaagttctctctcctaagggccttccctgaccactctccacaatgggggctgctccctccttccacctcctacagcatttgctttaaccacaacgcaggcccttggggtatgccaactttaagattctttgttacctcctgcatgcctatccatctggtctcttatataaaatctgagctcctttaagatgtggtcattgttatacatcttttgcacctcccactcaccacagagtttcctggtgttttatttaaatggcaggcactcaatacacatctgtttaaactaacaggaagcaacaccaaaagtactaggcaaacagaaaaacgcatgtcgttaagactagaaacaaaactgacttcctagactttaacttctacatctagatgaaacattacctgacacttgccacaagaacatcctccataagaaaacatctgtcgttggccaggcacggtggctcatgcctgtaatcccagcactttgggaggccaaggcaggaggatcatgaggtcaggagatcgagaccatcctggctaacacggtgaaaccccatctctactaaaaatgcaaaaaattacccgggcatggtggcaggcgcctgtagtcccagctacttgggaggctgaggcaggaggatggcatgaacctggggaggcagagcttgcagtgagccaagatcataccactgcattccagcctgggtgacagagtaagactccatctcaaaaaaaaaaaaaaaaaaaatctgtcgtatgccttagccccacatgttttataacaagtcctgtcctgactaccaccacccaggatcctgtgccccgagccagcccaagtgtttagccattccctccacacctgtggcactctgacagctctttactttgtatgtgttgttttctttgcctaaaaaggtcttccattgccaacaaacccttctctacctactcatcttcgagcgtaattcaaacattaccacctctccataacttaatgactctccatagaaagatataattagaccacaccatcttctgctaattaatcctgtacactacttatcaatcatatcatggcttctggggttttttacacttacacacagttctcactctgatattaatggacaggagccatgatgtatgcattgatacacacccagtccatgacactgtatctaggtaccttcaaaaaaacagtggaactgattctaaattctcaaacaaatgaaaagggcagaattgggctcattttaatcccctaggagccctctttccttatctggctcagttccactggctgtcgctgatctacagagctgccaactttcctgctaccatcacacctggtgtgaaggctgcaatgaagctcccttccacctcccaagctaaagaagaatcctctctttacacaggttagcagagagaaggctgggatatttcacatggaatttttactaggaagaaagtcaagtcaggaaaaagtcacagaaaatcagcaaagtagacaggtttacagaatgcttactgctgatccataattaactaagaagctcggcctggcacggtccccacattgctgtgtttcccgttcttcccctcaccacaataccatctgtgataaatggtaaacctgacatccttagcatgctaagccaaggcagatttgggttggtaccacactatccaggcctggtgagatcaccagaacttttgccagatccacaatcctttccacaaactgctgactgctgttttcttcaggtatggtccccctgacgtcatctcttaggactccaagccacacaaactgttactcaaaagtcacatagtcccagccaccccaagggaagagagtacttccccatttataccaaagattccaccctcggccttcaagtgcacttaaacagaaacactacaggtgtctctccagaactctgcatgaattctcaccctctctaggtctacctgatcaattagactctcccccagtatagtcctgctggctgctgaaagtggatgtagcagctgacaaagatacatcgttccaaactaaggtctcagcctagcttctccagggaccatgtggcctcctcgaaaggtggacacagcctttaagtggagtcttatcaatggatcacaccaaccagtgagattgtaagatgcaccatgtattgagacaccctctatggtgttcccacttcctgtcagaaggatgcccaccactcttgcttgtttagaaaacagaagtaacagataggtcctcggttcaaagaacgatgacttctttaccagcttaagctaatgagctactttccattttgataggatctttggcagcccacttagttacttttctgcaagtgatctttcagatttctgtcactggagttttacaatatcaacacaccttaaatgcacatacgaagaccttctctggttctctcatacagacctcattccaaccatggtggtcccaacatgcacaaccatagagatcagcttaggtaaggaacaaatgcttttctgttttctggactttcatcctccagaatccttttccaacttagaaactgtatactgtattgtggccagaaatggtggctcgtgcctgtaatcccagcactttaggaggccaaggcaggcagatcacttgaggtcagaagttcaagaccagtctggccagcatggggaaacccgtctctactaaaaatacaaaaattggtggatggttccaagatggccgaataggaacagctccagtctacagctcccagcgtgagcgatgcagaagacaggtgatttctgcatttccaactgaggcaccagggtcatctcactggggctcattggacagtgggggcaggacagtgggtgcagcccaccaagtgtgagccgaagcagggcgaggcatcgcctcacccaggaagcgcaaggggtcagggaattccctttcctagccaagggaaggggtaacagacggcacctggaaaatcgggtcactcccaccctaatactgcgcttttccaacggtcttagcaaacggcacaccaggagaatatatcctgcgcctcgctcggagggtcccacgcccacggagcctcgctcattgctagcaaagcagtctgagatccaactgcaaggtggcagtgaggctgggggaggggcgcccaccattgctgaggcttgagtagtaaacaaagcggcctggaagctcgaactgggtggagcccaccacagctccaggagtcctctgtagactccacctctgggggcagagcatagccgaacaaaaggcagcagaaacctctgcagacttaaatgtccctgtctgacagctttgaagagagtagtggttctcccagcacagggtttgagatctgagaacagacagaatgcctcaagtgagaccctgagccccaagtagcctaactgggaggcgccccccagtaggggcagattgacacctcacacagccgggtacccctctgaaatgaagcttccagaggaaagatcaggcagcaacatttgctgttcagcaatatttgctgttctgcagcctccgctgctgatacccaggcaaacagggtctggtgtggacctccatcaaactccaacagacctgcagctgagggtcctgactgttagaaggaaaactaacaaacagaaaggacatccacaccaaaaccccatctgtacgtcaccatcatcaaagaccaaaggtagataaaaccacaaagatgggggaaaaaacagagcagaaaagctgaaaattctaaaaatcagagcacctctcctgctccaaaggaacgcagctcctcaccggcaacggaacaaagctggacggacaatgactttcacgagttgagagaagaaggcttcagacgatcaaacttctccgagctaaaggaggaagttcgaacccaaagcaaagaagctaaaaaccttgaaaaaaagattggacgaaaggctaactaaaataaccagcgtagagaagtccttaaatgacctgatggagctgaaaaccatggcacaagaactatgtgacaaatgcacaagcttcagtagccgattcgatcaactggaagaaagggtatcagtgatggaagatcaaatgaatgaaatgaagcgagaagagaagtttagagaaaaaagagtaaaaaagaaatgaacaaagcctccaagaaatacgggactatgtgaaaagaccaaatctatgtctgactggtgtacctgaaagtgatggggagaatgaaaccaagttggaaaacactctgcaggataatatccaggagaacttccccaacctagcaaggcaggccaacattcaaattcaggaaatacaaagaacgccacaaagatactcctcgagaagagcaagtccaagacacataactgtcagattcaccaaagttgaaatgaaggaaaaaaatgttaagggcagccagagagaaaggtcgggttacccacaaagggaaacccatcagactaacagcagatctctcgacagaaactgatctcccgacagatctctggccagaagagagtgggggccaatattcaacattcttaaagaaaagaattttcaacccagaatttcatatccagccaaactaagcttcataagtgaaggagaaataaaatactttacagacaagcaaatgctgagagattttgtcaacaccaggcctgccctaaaagagctcctgaaggaagcactaaacatggaaaggaacaactggtaccaaccactgcaaaaacatgccaaattgtaaagaccatcgatgctagggagaaactgtatgaagcaacgagcaaaataaccagctaacatcataaagacaggatcaaattcacacataacaatattaaccttaaatgtaaatgggctaaatgctccaattaaaagacacagactggcaaattggataaagagtcaagacccatcagtgtgctgtattcagcaaacccatctcacgtgcagagacacacataggctcaaaataaagggatggaggaagatctaccaagcaaatggaaaaaaaaaaaaaaaggcaggggttgcaatcttagtctctgataaaacagactttaaaccaacaaagatcaaaaaagacaaagaaggccattacataatggtaaagggatcaattcaacaagaagagctaactattctaaatacatatgcacccaatacaggagcaccaagattcataaagcaagtcctgagtgacctacaaagagacttagactcccacacaataataatgggagactttaacaccccactgtcaacattagacagatcaacgagacagaaagttaacaaggatatccaggaattgaactcagctctgcaccaagcagacctaacagacatctacagaactctctaccccaaatcaacagaatatacattcttctcagcaccacatggcacttattccaaaattgaccacatagttggaagtaaagccctcttcagcaaatgtaaaagaacagaaactataacaaactgtctctcagaccacagtgcaatcaaactagaactcaggattaagaaactcactcaaaaccactcaactacatggaaactgaacaacctgctcctgaatgactactgggtacataacgaaatgaagtcggaaataaagacgttctttgaaaccaatgagaacaaagacacaacataccagaatctctgggacacatttaaagcagtgtgtagagagaaatctatagcactaaatgcccacaagagaagcaggaaacatctaaaattgacaccctaacatcacaattaaaagaactagagaagcaagagcaaacacattgaaaagctagcagaaggcaagaaataactaagatcagagcagaactgaaggagatggagacacaaaaaacccttccaaaaattaatgaatccaggagctggttttttgaaagatcaacaaaattgatagactgctagcaagactaataaagaagaaaagagagaagaattaaatagacgcaataaaaaatgagaaaggggatatctccaccgatcccacagaaataaaaactaccatcagagaatactataaacacctctacgcaaataaactagaaaatctagaagaaatggataaattcgtcgacacatacaccctcccaagactaaaccaggaagaagttgaatccctgaatagaccaataacaggatctgaaattgaggcaataattaatagcctaccaaccaaaaaaagtccaggaccagacagattcacagccgaattctaccagaggtacaaggaggagctgctaccattctttctgaaactattccaatcaatagaaaaagagggaatcctccctaactcattttatgaggccagccatcatcctgataccaaagcctggcagagacacaacaaaaaaagagcattttagaccaatatccctgatgaacatcgatgcaaaaatcctcaataaaatactggcaaaccaaattcagcagcacatcaaaatgcttatccaccatgataaagtgggcttcatccctggggtgcaaggctggttcaacatacgcaaatcaataaaagtaatccagcatataaacagaaccaaagacaaaaaccacattattatctcaatagatgcagaaaaggcctttgataaacttcaacagcacttcattctaaaaactctcaataaattaggtaaagatgggacgtatctcaaaataataagagctatctatgacaaacccacagccaatatcatactaaatgggcaaaaactggaagcattccctttgaaaactggcacaagacaaggatgccgtctctcaccactcctatttaacatagtgttggaagtcctggccagggcaatcaggcaggagaaagaaataaagggtattcaattaggaaaagaggaagtcaaattgtcctgtttgcagatgacatgattgtatatttagaaaaccccatcgtctcagcccaaaatctccttcagctgataagcaacttcagcaaagtctcaggatacaaaatcaatgtgcaaaaatcacaagcattcttatacaccaataacagacaaacagagagccaaatcatgagtgaactcccattcacaattgcttcaaagaaaataaaatacctaggaatctaacttacaagggatgtgaaggacctcttcaaggagaactgcaaatcactgctcaatgaaataaaagaggatacaaacaaatggaagaacattccatgctcatggataggaagaatcaatatcatgaaaatggccatacttcccaaggtaatttacagattcaattccatccccatcaagctaccaatgactttcttcacagaattggaaaaaactactttaaagttcatatggaaccaaaaaagagcctgcattgccaagtcaatcctaagccaaaagaacaaagccagaggcgtcacgttacctgacttcaaactatactacaaagctacagtaaccaaaacagcacggtactggtaccaaaacagagacatagaccaatggaacagaacagaggcctcagaaataataccacacatctacaaccatctgatctttcacaaacctgacaaaaacaagaaatggggaaggattccctatttaacaaatggtactgggaaaactggctagccatatgtagaaagttgaaactggatcccttccttacaccttatacaaaaattaattcaagatggattaaagacttacatgttagacctaaaaccataaaaaccctagaagaaaacctaggcaataccattcaggacacaggcatgggcaaggacctcatgtctaaaacaccaaaagcaatggcaacaaaagccaaaattgacaaatgggatctaatcaaactaaagagcctctgcacagcaaaagaaacaaccatcagagtgaacaggcaacctacagaatgggagaaaattttttcaatctactcatctgacaaagggctaatatccagaatctacaaagaactcagccaaactcacaagaaaaaaacaaacaaccccatcaaaaagtgggtgaaggatgtgaacagacacttctcaaaagaagacatttatgcagccaaaagacacatgagaaaatgctcatcatcactggccatcagagaaatgcaaatcaaaaccacagtgagataccatctcacaccagttagaatgacgatcattaaaaagtcaggaaacaacaggagctggagaggatgtggagaaataggaacacttttacactgttggtgggactgtaaactagttcaaccattgtggaagacagtgtggcaattcctcaaggatctagaactagaaataccatttgacccagcaatcccattactgggtatatacccaaaggattataaatcacgctgctgtaaaggcacatgcacacgtatgtttattgcggcactattcacaatagcaaagacttggaaccaacccaaatgtccatcaatgatagactggattaagaaaatgtggcacatatacaccatggaatactatgcagccataaaaaatgatgagttcatatcctttgcagggacatggatgaagctggaaaccatcattctcagcaaactatcgcaagaacaaaaaaacaaacaccacatgttctcactcataggtgggaattgaacaatgagaacacttggacacaggaaggggaacatcacacactggggcctgttgtggggtggggggaggagggagggatagcattaggagatatacttaatgtaaatgacaagttaatgggtgcagcacatcaacatggctcatgtatacatatgtaacaaacctgcacgttgtgcccatgtaccctagaacttaaagtataataaaaaaataataataacaacaatacaaaaattaactaggcgtggtggtacatgcctataatcccagctactcgggaggctgaggcatgagaatcacatgaacccgggagacagaggttgcagtgagctgacatgcgcaacctgcactccagcctgggagacacagtgagactctgtctcagaaaaaaaaaaaaagaaaaaaaagaaactctacactgtatttctgggctaaaaacaaatttataaagaacattgctttgtttttaagagacagggtctcactctgtcatccaggctggaatgtggtggcacattcatagctcactgaagcctcaaattcctaggctcaagccatcctcctgcctcagcctctcactgggattacaggtgtccagaatcctgattttttatgtataatctaaatctccttacaaatgtgtccttttttttcctccccacaaaactatccctgcttttaattcatttgcttttggagtctttatttctcctttacttaaatcattacttaatttcaagcatttactgaatcaatacataacacatatcagatgcaggacacctttcatataagttacctcactgaatcgttacaatttaaaaaaatgttttattatgaacatgttcagaccaggtgtggtggctcacacctgtaatcccagcactttgggaggccaaggcgtgcagatcacctgaggtcaggagttcaaaaccagcctgatcaacatggtgaaaccccgtctctactaaaaacacaaaattagccgggtgtggtggcacatgcctgtaatcccagctacccaggagcctgaaaatcacctgaacccgggaggtggaggttgcagtgagctgagaaagcgccattgcactccagcctgggcaacaagagtgaaactctgtctcagaaaacaagaaaagaaaagaaaatttttcaaacatatacaaagtagagagaacagtgtaataaacccaatattccatttcccaatttcaaaagttatcatcatactgcctactcattttcctcaactcaacaaaactggattatttaaaagcaaatctcagaaacggtagtctcatctgtaaaaatgtttcagtgtatatctctaaaacatagactctatatttcccataatgagaatattatcagcctaaacatcgattaataccaactccttaatatcaaatatcctgtccatgttcaaagtccttgatgtctcaattagttttaatagtaacacattgtgatgaggaaagagaggttcatagatttaatacctttctacaccatattcagtacacatcaaatttctcatttgacaccctggtcctctttccatacaactcagctgccttttcataatgtttagaaaaacatatatatataaaatatgtgtatattaatatatgttattaataatatatcatatatgtgtgtgtatatatacatatatattatatgtgtgtatattatcttacaaaagtggccttttcttttctgagtactttaatttcagctgaataacataaaggtgtttcggtgtctggaacctgagacagacttttattctattaatcattcactgcccactatcacaaaataggtggaaatataagatgccagtataagacacaaacttccatggtgtctgttgtgctctagtatctagtattatccatactggagcctcctctcaggataccgcagtcatcataaagtgatgataatgatgatgaccacaacaataggcttctaccagggagagacagtatagtcccatggatgagtgaaggattactgagatgtttacaatgagctttaaacttcctaggagaaaaagctatacgggtcaatcctggaaaggtaaatgggttgcaaaactgaatactccagcaaccgcttttattcacataccttacaccacatgagataaaagaaattaaaatataagccatgttgtcatcacagtcacctacattttaaaaagcagacgtatttgtaaggctctcccctcttaagacatgttgggattttctttttttttttttttcttgagacagtcttgctctgtcgcccaggctggagtgcagtggcacgatctcagctcactgcaacctccgcctcccaggttcaagcgattctcccacctcagcctcctgaatagccaggattacaggcacgtgccaccacacctggctagttttggtactttcagtaaagatggggtttcaccatgttggccaggctggtctcaaactcctgacctcaggggatccacccacctcagcctcccaaagtgctgggattacaggcatgagccaccgtgccgggctgacactttgggactttttcaaaatataacaacgaaataaagagctgtttgaaaataatatttaaaagttatagaacacaaatcaaacaagaaacaaaatagattcctttatactgaccttcaaaaatattgttctaagctcagctggatctgctctcttggttaaagccacctataaataaacataaaaatgtttatgttattacaacaaagctgagaaatcaagctagccgactaaaggaaaataaatctcagattaaaaattagtgcatttcatttttgtacttaaataccatgttgccccagtgcataaactatgcccccttcccattttaaattagactccttatgcagcttctaaaatgataaaattttatgcaaggaaccagtagcaaaatctcttaatatctaatgttgaatgtatatcatttcttaaaaagaaaaggtgaaacattgcaaacacctgtcattttttacttataatccagtgtaaaccatgccctttcacaggagaatttaagtaaacaaatgtttgtcaactatgcaagagaacatatttcttttttttttttctgagacagtctctctctgttgcccaggctggagtgtagtggtgcaatctcggctcactgcaacctctgcctcccaggttcaagcgattctcctgcctcagcctcctgagtagctgggattgcaggcgcgtactaccactcccagctaatttatgtatttttagtagagatagggtttcaccatgttggccaggctggtctcaaactcctgacctcaagtgatctgcccgcctcagcctcccaaagtgctaagattacaggcgtgagccatcgtgcccagccaagagaacatatttcttaaagaagtcagtgaactagggaaatcatattaactcaagggagttacttctcacagtttcaccatgaacaggcatgtatacctcactacctgggcatgccaaagaacctctcctcctctcctcagtttttaattaataaatcataggtctccaaaggtatgatattattctacatattttagaaatacaagtggctgtggttatctttgaagagcaaaaattgacagattagctcagaatgggtgttgtgcttaattctgcaggccacaaagtccaaaaacattgctggggaaaagcaagacaaacttcaacatggcttcctcaggccaacacaaaagagcccttatgtggaaccaaacagtgggtttattcaatgtcccaacacccaatcctcctagcaaaaaacatcatgagactgggttcccaccaagcacagagccaccccatgatgaagccaaggagaggttcctggaaccacccaacactggacccatgttgctatccacagggaaacttatgcaaattgtcctaaatcccttctgtgagctagtgaaggctgttctgagatctttggacaatgagttctctgtctctaaatatggaactgcctgagctcctaggctctccactgtcaggaataattttattaactaatcactagaatgggagtagtctttctgaaaccagatggttggtcaccttgtttcccaaagcaagactgataactcttcatttcagctgagtgcttgtaaccaccaaggctattcataagaatttgtaatacttttttttttttctttgagatggagtttcactcttgttgcccaggctggagtgcaatgatgcagtcttagctcactgcaacctcagcctcccaggttcaaacgattctcctgcctcagcctcccaagtagttgggattataggcatgcaccaccatgcccggctaattttttatttttagtacagatggggttttaccatgttggccaggctggtctccaactcgtgaccttaggtgatctgcccgcctcagactcccaaaacgctgggattacaggcatgagccactgtgcccagccatgaatttttaatctttttaaaaatcctgaattagtaagtgttctctgctgttcaatagaggagaagaaaatgtactgctagttaacctaagatgaatgactctgctgccctaaaagcttcagagaggactccctcctctcaggtctctattctgagaaaggtagggtaggacgaacacaagagaagatgggacagcataaaatgcccccatcctccactttaagagcagaaaaatctcctccttgatggtaagagtcccacatctcatggaagtacataacacttttttcaaaagcatatggtaccctaagttcttaactgttttcctcttaaaagcaaaataaattttccacaaaatgaagtattcttcgtaattctaaaatagaattaattctttatgccatgaactttgtaaggtcttgcctgggcaatgctatttcagagtgaacctcccctgccctcaattttcatagcacatttctgcttaaggatcctgaaatgtatattcagtgctccccatcagaactacacctcaaagggggaaaaaaagtgttcactttgtaaccttctcagggtctagggcagagaacacaaatcaaaacaaagacagagaatgacccaacacttataaggcatgttgcctaacatttacagttttctaagcaagactattatctcgttggattctcactgcaaatcagtcagataagatggatattactgccctaattttacagaagaggaaaccaaagctcagaaagcatcaattatttcccccaaaaagtcagattaagtgccaatctgtgctgacatttctaaatgttttctgagctgagatcagatcccaaatattccatctcttaccgtagtggccttcctacagacccacattacaggcagcttcaaagtgttgataacttgcattagctggcaatataatacagtcatgcatcacttaacaacaggataacattctgaaaaatgcattgttaagtgatttcatcattgtgtgaacatcatatagtgtacttatacaaacctagatggtgtagcctactacatacctaggcaaatgagatagcctattgctcctaggctacaaatctatacagcatgttcctatactgattactgtaggcaactgtaaaacaagtatctaaacatagaaaaggtgtggtaaaaatatggttttaaaagataaaaagtggaacacctgtacagggcagctccactataatttatggagccaccatcatatatgcagtccttcattgatgaaaacatccttatgtggtacataactgcaatatagtacaagcctaaaaatcaaaactctcccaatttctcctaacagtgtgtagtgtctgtccaatgctgtgattaaggacatgatcttacaggaatggtggctcatacctataatcccagcactttgggaggccaaggtgggaggatcacttgagccctggagtttgagattagcctgggcaacatagtgacaccccatcttcattaaaaaaaaagaacatggccttagtgtcagatcatcctcaaatagggagcaggaccaacctcataaactcactggccatgtgacttggaggccctgacctctcagcctcactttcctcatttataaaatggggagtcctagacagctagaaaagtaatatgagataattacacaaagtgcttagcaccaaaagggccacacagttaaagtgctcaataaatggtatctattactatttgtattatttatccaaagatgtttatgttctaccatgtttactccttaagaaatctaaatgatgggtaaactggctcataatttagaagggataaattagcaaaagagaagagaaactcatgggtcttcaaacacactcaccaaaccactaaataaacattgtggccatcctaactgataattgtctcagctaccctacccccaacccagagttccaggtacagcaaatggttaatgatcaccacaagatttctctgaggcccactaaaatttggctcaggtcctggtacattctatttaaggatagataagtatggttcaacaggggatggattcagaaaaattactaccagcctcctgggcctcatctctatagtaattccatctattattcaccagtcaaatgctgtgtggctgttcggaatttccatttatactgctacctcccattcctatcttcttgttttaagtgtcatttgctatgaatgaagaacacttacacaacttaattgaagacaatgcaaagttaccatgagatgtaccagttttttaaaggtgtatttcaatgaattctacctggtggcaaaaccaatacccaggaagttctatgagctggaaaaaggaagccacagaaatgtagccacccttttaaagtcaattcagaacagctgtccagcatgcatactttgcatcacataagcttgggattattagacttagttcattcttgggctttagaagcctggaattattagacttcgttcattcttggggtttagaagagtcatcaaactttagattgtttccagaaggcttactttcactgttacatttttttctcatatattaatagcatgcaaatatttacagctactattgttataactgcctgattttctttatgattcttcttctgaatttgcatttgtaagaatggattccaacattaaaacaaaaattttatatcaagaattttaaatcaagtaactggttttcaaacatacagagtaattcactaagaagaaaggggtcctttacagattactatgaaatattatttgctaacaagataaagaattttgttgaaatttgataacattttactctgattccaaatttaagggaaaaagagagggttttggtgttttgttttttttttttttagttgggggtctcattgtgtcactcaggctggagtgcagtggtgcgatcatggcttactgcagcctcacactcctgggctcaagcaatcctcccacctcagcctcctgagtagctgaggctaaatgcatgtgtcaccaggccccactaattttttaatttttttgtagagacagtctcactatgttgctcaagctagtctcaaactcctggcctcaagtgatccttccatcttggcctcccaaagtgctgggtttacaagcatgagccaccatgcctggcccagaaagtggcaatgttggaacagaaaaactctatgcatagtttcttccataaactgggaaaagtctatcattatttaaatttagtatggaaatttcaggtcgattcaatgagtctatgctccacaggagcaaaatttgagaatcactgaatatgtaaaactttttgacaagataaacactggttataattgtgtaagtcatcaatagcgtttgcaaaacacatactaggtaggtacatcctagaaataaaaagaaaaacaataacacaatttcaagaactggtgtttttaaaaaggcagggggtaggggagaacatggcaagaagaatacaaaagtcatctttcaggacaaatgaattcactctcctaatatgagttagagcagccataggtagggggtcaccagaaaattcctacctgtaggaatattttttaaacagactttcttacaagggaatcaagccacagttgcaggctcattactttaacaaatcacagtggtatagaatggtgtattcaaaatagttgtcagatctaagagaggatggtggggaagaatataagaaaacctacacgaaaataagaaatgctaatttgaaaaataaaatgcaaagaaaagcaaagctctcctctttcactgggaggctgtagagatgtgagaccaccatctctgtgagggcaccttactcctcagatcaaccccaactctggcaaagatcaggaaacaaagtagattctctggaagtgctgaatatagaataaagtctttcaggtcagtaaaaatctgacatttacaatgaaaataggcaactctcttcagaccaatggttctcaaagtgtggagaccatcagcatcacctgggaacttttaaaaatacaaattatcacacccatcccagacccaaagaatcagaaactgggtgaggcccagcaatcccctatgatttaacaagccctccaggtgaccctgatgcagttaaagtttaagaaccacagctttagataatgtccaattttaatgtacggattataagatgtaggttctcagtcctcgctgcatattcaagtcccctgaggtgcttttaggttttacaaaacccaaaccataccaaaggtcaatcaaatgaaaatttctagaatggatatctttagagctccctcaagaaattaccatgtgtgggtggactgagaacaactgcgttaggacccgaggcccaacctcagctgctacgtcaccaactgtacagcacagcccttcctcagcaatacttccccagtcaccctcccaaacctgaaacatctgaaagccaagacaagcacagacttacactgaaaattctactatcataaagtaaatatttgccttagataagaactacaaactcaaagaggtagctcatcaaaagcaagcttctgggtgtgtgtgtgggtgggtgggtgtaaataagcatgcagtgacaagcaggaaacggagagagaaggagaaacagtcctgcatagtcttttgaacctgaggaaatagtgcagtagatggccctgaatcccaaagaaaagtattcttgggtgtaacctaaccacttagaagcaggggcccaccctccttctttatcttcctatactaaagacactagaaggctgaaactacaattcccagactcccttgctgctatgcggcctatgtgccatcaattagatgaaattgagtgagatttggcaaatgtttgggagttggggggcaccttctgctgtttctgccaagcacgcaccattgctggaagtgtctagttttcctgtggcaacctcctgccctcccatgtcagtggccacatggtcctgaaacactctccacttggcaggcagcattgtgactgcacaggaggtcactgctgtcttggtggcctgctctgcttgagactctagacgtcattctttagagctcaacctcaagtctgtttctttaccttcccaacaaattgtgtaagccatttaatatcctgtaataaatctctctctgcttaaaccagctagagtagattctgttctctgcgagtgagccctgactgatacaatcagtaattgcaaaagaaagtttggaattccctaaaaccacagttaccattaacttgagaagaagaaaaaggtatctcaaacttaagaaaataattttttattgaaaccactgagtcactcatccttcatcctacagtttccctacgacctaataaatgaagagcagtcattatgggaaaagttactgaaatataaattagtacaaagacaagatgccctgttaagcattcttcaaaccacaacatttctatgtaatcagctggcaaaacttcatttcactcaacagttgacttataaagtatcagacaccacaaatgttaacccactgggtaattacatcagcgagtcatttcagaggcactagagatgtttatcagaaggattcagtaggttgtgatgtatgttagatttcactctgctctgttgtagaacataaactagaaagccatcatcattaaaattctgatattaagaggcagagtataacagttaagaatgaatggtggtgttttagctgggttctgttatgccaaaagagcctgaaacatactagttctggattttactattattgttattaagctgacctctacctgctagatgggagtagcaaccccttccccaacaagctgcaacaaccaagaaactgtctccagaggttgctaaaagaaatcctcttgggggccaaactaccccaccccccagctaacaaccactccttagatggtgatgctctacttgctcatccatgcaacacaatcacctatgggaaagctgcagtgtactaggcccagcgccaggcaccgaggagaaaacacccaataaatcagaaaccctgccccaagcagggaaagctgacttatcgacaagtggttggtacaaaatgtatgatgatacatgctatcataaggcagagtggcaggagaattaatacactaattctgctaaagttgagggtcacagaggcagtctttggagccggatcacttattattaattataacgataacaatgaccagctaacttttactgggtccttaactctatgccaggcattatgctaatggctttttatcttatttcatttatatactgtatcattaaaactctttaaggggaagagtgagtaatatccccacttttcaaataaagaagctgaggtactaaagagtcttaaatgaataccagtagatcacacagccagaaatgacccctgagctcaggttatttagacactaattataatacctgaaggatattcccagagtttagcaagcaaaaagggggactttaaagctacctttaagaatggagacactggacaacattgtaattgtaaccaatttaaaataaattctttttaatttggcattatgattcataaatgcccatggctcagtagaaggcagaaatgcctagtgcagaatattattctccagtattttatgctgaattcagtctcaatttttgtaagcatcaaggttacagtataattaggaaccagctgcaattgtaattaccacgcccaatataatttgttacatattagcaagtgtcaaattactactgctccttaaatgaataaaaactgattgtgctattctgaagactggggctatgttcctgatggggaacaaaggaatataaaaagtatatgacgtatttataaagtgctgaaaagctctacttaggagatcacaagttgctgaagcccagataatgccataaaaagttaaacacttctgagagagaaaagctaatttaataaatacagaggaagaggaagccaaaaatgaaaggacaataaagaagttgcttccattaaatatgccttacctgtccaaattcctgctatcaacctcatctaactgaagcacgtcaagaaccagaaggaagcaaaaaggaaaaggaaaggggctctctgcacagctggaggctcatctcaaagacgacacaccatctcacttgagtgagccctcctgggccctattccacagcccacagcttttgacatgactctaatgctttgcaaacattagcttactgacactctcaacagccctgaggagtagacaccgttatgtccattttacagatgaggaaactgaggcacagagaggttgagtaacttccccaagtcacacagttagcaagtggcagagccctaatttgattgcaaatctatgatttcagccattatgtgacactgtccttcagaggaaaagaaagcacagtattgagcaggcaagagaatccagagatcaaaagaaaattaggacacaagagtctgatttctgagcatcccccagtctgaccttcagggcaagggcagggagcttcccatttcagatacacctgtggttatgacagcccagtgcttctggccctccttgctgttcccggttctcctcccttctcccaaccttcttactggtgtaagaatagagagccttgggcctgtgtggccagacttctgacctcttgggcaactgcaggatggagactgcttgccttttgagcctcagctctcttcctcttgttctcctacgatgggagtacagcagccaaacggtagagagccttgggcctatgtggccagacttctgacctcttgggcaactgcaggatggagactgattgccttttgagcctcagctctcttcctcttcttctcctaggatgggagtacagcagccaaacggtgagcttagtcccatccacttccatcttctcttttgtgcccttcatccctctgcattttgttctttttgccctctgatacctcctagtgccctatcatctctacccccagggactcaggagatcatgcagcagaagcagaaaaaggcaaacgagaagaaggaggaacccaagtagctttgtggcttcactccaatctctcttgcccttcacttgtgtgcctggagccagtcccaccacactcgcatttcctcctgtagtgaccacaggtcccagcaccgatggcttccctttgccatgagtctgcggtgggtcccttttgtacttccttcccctcaggtagcctctctccctatgggccactcctggggtgagggggttagcccttcccagtgttttttattcctgtggggcttaaaagtataaaggtagctttgtaatttaaaaaaaaaaataaagaaaattaagacacatcagttgtaatgcatgaaccttatatacatcacaattcaacaactatttaaaaaattttaagacaatacgggaaatgtgtacaatgtgtacagaacacctatttgaagatattgaagaattattataattttttaaagtataataatgatattgtgattgtgctttgaagaaatcttgtttagagatacataaaatatttacagataggatggctgagtttgctttgaaaaacatatggggatgaattagccaggcatggtggcatgtgcctgtagtcccaactactcaggaggctgaggtgggaggactgttggttgagaccgcagtgagccataatcgcgccactgcacgccagcctgggtgacagagcaacatcctgtctccaaaaacaaaaatttaattaaaaaaaaaaaagtagggatggaaggaggaaagagggcatggcataaatgaaacaatattgaggacataaattgatgattactactggctagatagggagatgagggttaattatactattccagttttgcactttttgggaaatttccataatgagaagtttaaaaaatgatgctgttctttcaaggactaagtcaaatgcctcttcctccaggattctccaaccagattcccctcatagaatgtttcctatttcatgagctttgcaatggaacatttaaatctgactccactgcggccgggcgcagtggctcacgcctgtaatcccagcactttgggaggctgaggtgggtggatcacctgaggtcaggagttcaagaccagcctgaccaccacggagaaactcagtctctactaaaaatacaaaaatttagccgggcacggtggcacatgcctgtaatcccggctattcgggaggctgaggtaggagaatcacttgaaccagggttcaagaggttgcagtgagccaagatcgtgccactgcactctagcctgggcaacaagagcgaaactccatctccaaaaaaaaaaaaaaaaaaaatctgactccactgttaaccagcagcatgacctcttgttttctcatctgctaaaagtaagagaatagagaataacaattgaatgaaaacagcacaacttgagacaatctagcagcgccttgcttcccagttactcttcatattcagagcagcctagctgattgaggcagcagcagatacctgacccctgtggggaggtgatcttggctttctgaactaatcagatttcctctgaaggctgaaccagcagattcaggctgaattagcagcaggtctctctagctgatgatgtggcactagtgaagggtcacgaactcctggggttgagcaacaaaaattaaactggctccctacctttcatcttataccaaaagaactacagctggatcagagttaatctttaaaaggagagagagagaatttcaaaaagtactagaaaaacgcacaggtggtttcttatgtaatgttaagtagggaagctgatttcaaacatgacaaactcagaagccatataatccagaagccataaagaaaaaaatgataaatatttgacataacaatttaaaaagtgaatataaatcagttaaacaacaactgagaagaaaaacaacaacaaaatttgcaatagataggacaaaggggcaatgttcttcatttacaagcgctcttagaacaaatcaatgtgaaaaggcaaataaaccaatagaaaattgggcaaaggtcaagaccaggctcttctcaagttgctgttggacaccacaaatggattaactgaaatcttcatgaaccaccataaaaaaagaatctaggactgagctttcacttctggaactgagctgggaggcaatgaaaagatgttggcatcctcaaactcagaatcaacatcagcctgcaataaaatgagtgtgtgaattctcagaagtgaatgaaactccttgccagtgagcacaacaaagtcaaagaagagacaggatatcaccctcttgtccttcaagccatctgatgacccagggtactactgagactagcagggctgaaacagcagcaatggaacacattgtttggacctgctgggaattttgccctctaatgtacctgggcttttttaatcacaagggagagtttctctaggtgcctccttttgaagcagcctttctgtagtcatagagattcatctaccttgggacagcacaacccctgccaaggtctgttctgaatttctgattctccatgatgtgctcacctggcgattacccatgcacaactcctcaagtatttccaaattctcatcatattactttgttgggggatggagaggattgagcaaatggattattagaaaaaggtttacaacaaaccacatacatgcagcagaaaatctccttccccctttactttgccatgtgttggcatgccaagtaaatggacaattcaaccagcagtgtctgaatgctatgcaacagttactctgaggcatatctgtgtccagagaaggtccttgtcctcaagagttcaaaatctaggaggaaacaaaataaatcagcagcaaagatcacttcccttcagaaccttgacatcattatctcacccaagccatttttaaatgattcaataactgttatgggctgaactgtgtcccccacacctaattcatatgttgaagttccaatcccagcccctcggaagatgactggccatatatgaagatagggtctttgaaaaggttattaagttaaaatgagatgatgaaggggaccctaatccaataagactggtgtccttatacgaagaggaaattaggatacagacagagaaggaaccacatgaagacacccatctacaagccaaggagagaaggcctcaggagaaaccaaacttgctggggtctccatctcagacttttaacttccagaactgtgaaaaaataaatttctgctgtttaagccatccagtctctagtactttgttatggcagccctagcaaactaatacaatatcttttaatatggtccccatattccagctgtttcgattcttttctttatttgtttttaacccaggctcaagcattgtatttggtcatcaggtctctttgggagtttcctttattccagccttcttcattcataacactgacatttttgaagtcaagccagaggtcttgcagcatgtcctactttctggatttgtctgattgtttcctcacgattagatccagattaaatatttttggcaagaacatttttaggttcatgttgtatacttcccaatgcataatatcagtcggtaacataatgctagtttatcccatttgctgatgatcacttggttgaagcagatttctccattgtaaaggtactttttcccctctgtaaacagcaagtaatttactaggagatgcattcagacaatgggaattccaacagtcttttactgaaaggcttcagcatccaatgatgatccatgcctgaatcaattattacttgcaggtggcaaagtcaattttttttcctttttctaattctagcatagcttctacctttattagctagcattcttcagtaaagaaactttatcagtctattctccaactcactttggctccttttagggagcaataattatcactcattatgttgtgttggatttttttaattccatgtgttacaatccctttccaattgatttgtcttcattgtggtaaaatatacataccataaagtttaccattgtaaccatttttaagtatacaattcagtggcattaagtacattcacaatgttctacatcaccattacccatttcatcatcccaaacataaactctaaacccattaatatccaattgaattttaattgccattattttttataacaatgatatatactcatatatagacatacatacatacataatatgcatacatacacacaagagtgtgtatttaaataatgaaaatcacttttaactcaatgtaccaggaagggcaaatgttaatatttaaagttagctaattaaaaccattatgcaaaaagctggtggacttaagataacaacatctgaaaccactgaccaaaacgtaacatcacaagaaacaaccaagaattaggtgcttcctcatgtgagtacccagtaccaagtacccagcaatgtgatgggaagctctaagcaccatctaggaagtattctagccaaaaccaaaaaagactctaacttgatcaagcttttagattaaactgtcacttgcaggaaatactgaggccaagcaacaccacaaagacgtaatcagcaaagtccaaattgtgggaaattacaggaaagacgacccaattccctcatcaaataaactgcaaggaaacaaccaaaaagggggcaggaaaacctatagattaacaagatttaaaagacgtatcaaccagccatgtgtggactatatctgaatattgattagaacaaaccaactataaaaactgtaatcttaggacatgggttttagcattcctacagggacttcaagaaatgggaaaatagaaccacaaccccttctgaaaactgaagagaagaactcagacaaatatatatatatctgcccaccaatacagagaaatgaaaagaagtatttctttctgacaaaggctaaaaaaaaagaaacatttctgtctctgactgacctctatgttaaacaaacaaataaacaggctctcttttatcctgctaccctgttgccatagctttatggcaagaaatatgaacagaggttgttatgtcccgttcacaaactgctgtgaagaatatgaaaatcgaatgagtctggggtaatactgggaaagtactaaattaaaagtattgaaaatgcagccaagaccaaggagattttagctggctaaagagtttaaattttattctgcaggcaacagaagccacactgcatagcaagataaattaaagagggcaatgcagcacactggttatgtgcttgggctctggagccaggctgcctgtgttgaaatcatagctctcctatttacaagccatgtgatcttgggcaagttatgtaatctctctgtacctcaaagaacttaactactctgtacaaatgagtttctcgatgtatattatgaaggtgagagcacttacatgtcataggattgttatgaagattgcattagtagatataaagtgcttggaacagtgtccggcttttacaagtgttatataaacatatgctaatattattattattatttgcataacctttttgagccttaggtttctttatctgacaaatgaggttatcaacacgttccctgctaccttgtagatgattataaagatcaaataatgaagcttgggtctttatattatctggttatattaatccctgaagactttgagcttcttgaaaacaaatctagtagcttacctgtttttggaatcccagcacagtgtaggcactgacaaacagtcgtcgtcacttatgcccttgaatgcactttttaaagctgctaagtactgtacccatgaacacggtagtgctattatcatggcaacaagagccaatcttagaaaagtcctttggcagtctggacagaatggagaggaaggtgtagggatgagatcaaaagcaaggggatcagtgggagctacagcaatggtacagctacaaaataaagaggccctgaatttgaacagagaagataggacatacatgctccatggccgtagaagggtttcactgatccacctcttttgccacatccaattcaggctgatggtgtctctcctatctgcccataacaggtacttaattgaactaactagaaactttatcaggaaagtgaagctgcaggatgaagtcaggaatgaccaaaaagatggattcagttataagaactggtgagttctaggtcagcagagtttgaaatatctttgagacagacaagttgagtcttccagctcaaactaaacagctaaaagtgcagggctagagcttgagacagccacccaggctgaggagtgttaaggagccaatacccattaagggggcaggtagtgcggcaggaactggagggaggagacaatctcaggcacagccttgggggacactaaccttccaggtgtccaggcagaatgaagagaagcccacaaggcacagcactattcacagtagcaaagacaggaaaccaacctaggtgcccatcaatggtgaattgcataaagaaaatgtggtatatatccaccgtggaataccttgcagatataaaaagaacaaaatcatgtcctttgcaacaacatggatgcagctggaggctatgatcctaagtgaattaatgcaggaacagaaaaccaaatatcacatgttctcacttataagtgggagctaaacaatgggtactcatggacataaagatggcaacaatagacactggggactactagagggaggagggaggggaacaagggttgaaaaactaattattgggtactatgctcagtacctgggtgatggggtcaactgtaccccaagcctcagcatcatgcaatatatccaggtaacaaatctgtacatgtacctccggaatctaaaataaaagttgaaattattttttaaaatgtacatttaaaaaaaaagaaagtaagaccctttgttagattcagaaaaagtgaaagatttctagatttttgctaaagtaatgcttctcaaaaggtgcagcattagtgctggacctacatatacctgacctgtacagggaagggaaaaacactacatttttggccaaaattcctcattggtaaactagtacattctgttttgaagattagggtaaagtgtactatcattctatatgcatatgtcatgctgctaaacactaaaataaaaatatatctttgctgggaagaaagaagacgaaagaagaaagaagaaggaaggagaaggaggaggaagaaggaggaaggaaggaggagaaaggatgaaggacgaagaagaaggaagaagaagaagaagcctgcaaaggagaataaaggggtaatatgagatgctagaggccaataatgagaggggacatcatgaaagcagatggcgagaaagaaagggtaggacacagggtcatgtgaggccagaaatgaggacaagccaacaggtttagaactgaggttactggtgacttttaggagaaggacatttaatttagttcatttcacccaattagagggtctgtctggttaaacaggccatgaaaatagagtttgctcagtagctgttaaatactttgctaaaggaattgtatcactacacaaaggcatatccccctccttacctccaagcagaaccaacacatgtctcagcgtcacacattcctctgttgcaaggtccaccctaaggcaaacccacagagtcttatgaggaaatctgtaggtgtttatgaggcagcaaatgccaaccagagaggaggaagcgctcagcaggaatgccataatagataatcctcacacatagtggagaacaaagggaggaatggttccctctaagaattcatcaaaagcagagactggtcatgggactaaaggtctaagagaccaaagcacagaggagtcagagctcctcggacaatcttctaaaagaactcaatatccaaaaaagacctgctccctgacttttttacgctacatatcacctttcaactctccccacacctttccaaccctctatttgctgtgaagccatatgacctaagccagggaacactggcaccacatggccctggatgaggttagcccaggagagggctctgagaccaggtttgctctttgtaatgcttccctcctccagcaccttctctgatcacaaaaaaccactgagactctgcaggagacaaatggagctttcagtcaagtttgggattaaaacctctattccaggattatcacaaaactgtataaacttgatgcctaagcaccctggagacaccaggcaggactaagacaaagctgtcaagaaagaagagaaatttggagaaacccctacatacccctcctttgaactgacacaccagggactttaacttaatctcactgcattccattcttactccaagaaggagccagcaggtctcttgaagcaatgtgcaccaaaataacagtggttgtcaagctttcaaaaatcctgaggctcaggccacacccaagtccaattcaatcatgatctctggagggagacccaggcatcagcagttttttataccagtccagaagacttcagtatgtagggaatcactggcctagagcagtgccaaaagcaaaggcattcatgggaatttggaccaataacaaatgtttctgggactccatttctaggactctcctggtaaaaggggacaggactgaggaaggaaagagtaaagatcattgtgttaacataaattccaaggccatccagctccaacaagataagaacccctaaaacccaaacagtggagccatagatatttgttttaataatcatcatcatggtagcataaaaacaactcaaaccttctttcctccattcctagcacaaaaactgatttgttttattatgatatcaccaaatacttagtagagtttttacataggggagaaaaaaccctgccatttgaagaatatctttaataacctcaatatattttatcctcaatgacaaacctctgaagagggttttatgatgggtgaacaatgtggaagacatggaggttaaatatacagcccaaagcctgggcgacatagcaagacccccgtctctacaaaaaaaaaaaaaattttaattagctgggtgtggtggtgtgtgcctgaggtcctagctattcaggaggctgcggtgggaggatctcttgtatccacgaggtctaggctagagtgagcaataatcacaccactgcacttccacctgggtgagagagtgagaccctgtcccaaatatatatatatatattatagtccaaatcctaatggaaactggattaaaggtatatgacagtggtgacagttacacaactctgtgcatatattgaaaaccaataaatcatatgctttaaatgggtaaattgtatagtacttgaattatatctcaataaagcaattaaataaaaggtatatgacaattcctgtcctgcagggatttgcgatctggttggagagatgagaaatacacttaataaacactgaaatgaagcatatacagagtgacaaaggtgttctaagataagaactactggactgggatgatcaggaaatatacacatccatacccgatggcatgtgaactctcacacatacaccttcgcaaatggaactcttggtaagacctgggagagcagcgcagaggttaagagcagagactctgaagacacattggcaaggttcaaatcaagactgtagcacttacctgttgcacaagcgtgagaaattacttaacctcccctaactcagttttctcacctgtaagttgaagtcaaaaacagaaagcacctacttcttagaattaagaaaattaattgagttactatttgtaaggctcttggaaaagtacctggcatgcaaaaagcactaggtaaggcagttctcaaataaaagtctggtttacactgagacacctacccctctcctaagtcatctcccacacctctcccatatactttattctccaccacactaaactaccaggcacacatggtggacagagtgaggccacagctgctggagccagactggcaggatttgaaccccagctcgataatttcctaattatccgatcttttttattttattttatttttttgagacagagtcttgctctgtcacccaggctggagtgcaatggcacgacgtcagctcactgcaacctccgcctcccaggttgaagcaaattcccctacctcagcctcccgagcagctgagattacaagaatgcaccactatgcccggctaattgtttcctatttttagtagagatgggccagactggccaggctggtctcaaattcctgacctgaggtgattcacctgcctcggcctcccaaggtgctgggattataggtgtgagccaccgtacccagccatacttatcagatcttaggccactaacatcacctcttggtatctcagagccttcatctataaaaaaaggatgatagtaactaactcaaaaggctgaggcattaaatgaatcaacaacgaaacacagttggaactgaattttaaatgaatcaacaatgaaacacatttggaactgaatttggtatctagtaagcgctcagtaagtgtcagctgcttttagtttttattacctgctgttaactaaatgtagcctgtgctctcacctcccagcccttcatttgtttccaaccactggattggatctttactcttccccatccattccttctgaaatactagcaattttcagaagacttccctcatctcctcagaaatgggctcttctcctactgctcccacaaaccttgtagtgggagcatttccatcagagaacttagccccctggaatggttttggttttcttgaacatcaaaatggagtccaattcattttatttattttattctattttattttattttattattttattttactttattttatttttttttgagacaggatctcgttctgtaacccaagctggagtacagtggtgctatctcagctcactgcaacctctgccttctgggctcaagtgatcctcctgccttagcctcccaagtagccgggaccacagatgcgtgccaccatgcccagctaacaattcattttagtattctcaattttgtcccatttgcaacactggaaagaacacaatacacataaatgaatcaatgatcacagcaacaactcatccaagaatgaaaagtcaatacaaagtgtactagtcctacagaccaaattgtctttattattaatgctttaatgtgcccccaaatttccttcttttggttctaggctaatattggtctgtgttcagttttaccccagaacatctcacaggtctgaactcaagggagcatattctaacttttagtaggttcatataggttaattacatcattcgtaacgcataaatttaaccaatgacgaagaagaaagctctcctttaaccaagaaaagggcagagacgaagaaaagggtgacctctcaattaccaccttttaaaactgtttttttatggcagttttgggaaatgtttaaaagaaatattcaaacaacgcaaacagtacaggcagatctaacaagggaacccacaaggattattcctacaaacgtaggcagcaagagaatggacactttttgagataatctcagaatactaagagttttagattaatgttcattcacgaaagaaaacaaacacttcttgaaccattaactagtaatcttcatagcaaaattcaaaataaaaagcagccaaagactagattctccatctccccattaaaactatttaaaggaaggtcatgaataattagctgtatttaaataagtataaagaccaaagaaagaaacagatcagaaaactaattgctagttgtggctacatctatccagaaaataccaaatctgcttaaatattcaaacaatttgtcacagtgagtgtagtgagtgttggaattctcacagttgctgagtccccagagtctcagcccaatttcctaacagtccattgaggtgaagtcctctcctatccaggctcctcaacttttaagagggaatgccaaccctacccctatggctctgtgttcagctggcaacatggaatagctatgctccagggaaaaagcaaggagcacagcctttaactcaggctgccaacagaatcaaccgataaaggtgatgcccaaaggcagttcaataagggacattcttggaataagttagaccagcagcttcattgagggaccttttaaggccacatttactgcactgccattgagttataatgaaggacatgataagaaatggccttatgtaacccacagacatatatctgtggtcacaaggtagattcaaatgccgttcactcacagcatataaaagaaactgctcggctgggcgtggtggctcatgcctgtaatccctgcattttgggaggttaaggcaggcagatcacgaggtcaagagatccaagaccagcctggccaacatgatgttggcctactaaaaatacaaaaattagctgggtgtggtggcacgtgcctgtagtcccagatacttgggaggctgaggcaggagaatcacttgaacccagaaggcagaggttacagtgaggcaagatcatgccactgcactccagcctggcaacagagcaagactccatctcaaaaaaaaaaaaaaaaaaaaaactgctctcagagagcagtataaggagacttctctcccaagtaaatgacctcactgatcatttcctctttgctttggctgggagaaaatgcaatcacctctagtaagcacataatgttccactaaccttagtcctggctttgtcttactttccctttgtcctgtttttcccatctacttggaattgatttttatatatcttattggattgcaaaataagtatatatgatgtgagccatcagatatcacagaaagaggtgagtgcaaatgaagacataaacaaaaacacaagctcccaagtagtaaaaatgaacatttcattttccctgactcaatacttagctaaaaatcaactgcccttgatatgtgacacttctactattatgtagaagtacaaccaaagagttgaactaacttccatatcacttattttatgttttgtcgttgttgttatttgtttttgagacagggtcttgctctgttgcccagactggagtgcaatggcacaatctcggctcactgcaatctccgcctcctgagtttaagcgattcttctgcctcagcatcctgagtagctgggattacaggtgcccaccagcacgcctagctaacttttttgtatttttagtagagacagggttttgccacgttggccaggctggtctcgaactcctggcctcaactgacccgcccgccccagcctcccaaagtgctgggattacaggcatgagccacagcaccaggtcacttattttacttaatattactcaagtcttatactccatttctatgcacacgtctcaatttatgttcctcaattaccttatctcctaataaagtaaaagtatttacattacctgcagatataaaactaacagtaaagaatgggtacctagtcccacctactctagggaattagttcataccaagccttgtaccttggttgcatgcaaatttaatgcaaaaaaaaggtcaagggctattgggcttgaaagggttaaggcagcttccaaaattgaatcctagtgatgctcagagaaactgctgaaaagttatagatagatatacacacgcacacctgtgtgttcatatgcaaacatacatgagcccacacacccagagtactttcctaaggatgaaactcagagtaattacagaaaagagaaatgccacttagaccacagaaactaacaacatgaagaagcctacggatttggggagcctggagagacttaagtcatagaacagcatttaaatatatttgtctgcttacaatttccattgcaaatgtgattagtttgcttgaataaataggaatatgatgtgttggccatgttttcctcttgagggttatcacagagttttgattaaggacaaatgtttgaaatgttaggtatatttaagttcactgcacttaaaatgagctaagaagttgtataggcttgattagagggctgccttcgtgaacttaaattaaaagcaataaattccaaatgattcaagtgattgggactaaatatggtattctgccagagaagttgaaatgcagtccaaagagactgaaatggtgtccaggtttcaagaaatggtgaaagaggaaaggtcaagtgttggagttgcctttcctctgggttagtgaatgattcacattacacagaacccctttcaagtacaacttcacaggagtgacaggctcccaggacaatctgtttcatcgttcccaaaaagaagcctctcaaatgctccgaggcgggtatctaagtgttgtcagatggagagagggagggggaagatgggaatgatgggaaagcggggagggggagagtccctggactttttattcacaaaggcgcagaccaagtctcctaggcagtttccaaaacggaagtcaaagtaacttccccacccgcgggagggcggagcccttgaaacgtaataggatcaggcttcagcccgggctctggcccctggaagaagccggagtcaacaaccagcggggtcaggagcaggagcgcgctgggaaggtagagaggacccccagcgcttgccggcccagggtgcaccaggccccagtcgcgcccgctcctcctcgtcggccctggctcagccccgtcaggcaccaacttccctccccggccaagtgggagtgtccggcccacaaagtttccgctgcgaggtcgggcctcggtctctgcaccgaccgcctgtgctgcccgggaggagtggccccctccctccagcagccgcaaggtggaacggctgcccggcaccccattttgctccgcctgtggcaccaacccagacacgtgagcgcccgagcctctcgcacccccaggctgatccggcaggcgcgctccccccggcctcgggcccgcggttaccttggcggccgccatgattcgccccggttgcgggcgactgcgggacccactgactggctggctggcgtttgggacccgggcggctcacttctagtcccggcggcggcggcggtgggggcggcgatacggccaggcagcgtgcgttcctggcctgcct

SEQ ID NO: 101 - DNA, 201878 bp, Homo sapiens; identical to SEQ ID NO: 100
  source 1..201878: mol_type = genomic DNA

SEQ ID NO: 102 - DNA, 201878 bp, Homo sapiens; identical to SEQ ID NO: 100
  source 1..201878: mol_type = genomic DNA

SEQ ID NO: 103 - DNA, 42649 bp, Homo sapiens
  source 1..42649: mol_type = genomic DNA
ttaggaacataaacttttattgtcatccagcacctgtgatagtttcatgtctctctaaaggagacaggaaattggagcattgtgggcccttttaaaagaaaagaggagtaggtaggcacacccaggtgcttctaaaacaaccaagcccaaacctgacatgctcctccccacagtcaccttcattgtcccctttaaaagtctggaacagtatgtagcaaaacaaataaattacttttcatttcaaaaagtaagttcaaaggttgaagctgcctaggccaggcttctggacaggtgcctccaaagaagtgagctttccttttcaacttccttagctctagccagtagaccagaaacccctgctttccacatcaggattccagatggtgtttagttagatttgggatcccgttgcttgggcatctctcctccatcttccaaatccatttctgcagcaactgacatacacaggacctggaggtaccttgtggcagaccctacaaagagaactttgagttggaattgagaagaggtcagctgggctgagttcaagtgtcactgaatggaactcagtgtgaggggagtgattccactaagccgaagggttcataagaaggggctaaggcaaagatgtctttggaggctggatttacagaaaaaggcaaaaaccaagctctgcaatagctgagcggacttaaggatgcacggcttacccacgatccttcggaggtaaagcggtcgcttatgttctggcactctgatgatgaggaagtaaaagggcaggcctgagagggcaatggcaatgccgatgagggagttgatagtatcactgtaaagtggaacagccaccaggaagatggtgcagaggcagaagacaatcgggaagaaaacgctgagctaagggcacaggaaacataactggagtggacaactcaggattcttaacagctaaaataaccccacctcccataaggattagcgcactgagccttctttccatacctttaatttcaacacattactaacgaccaagtcccaggcaaaggtttctaaataaagtgctttgtcatagtcccttgtagcaacaactccagctgtttcaggtggagcagaggtaggatggagttgccttaccttgaggggacgaggtcgatcaggctccttccagcgcagataaagctgacccacaatagaaagccccacaaagaaccagtagctgaagctgtagtagttaatgagctggaagatgtcttccacgcacaagtagatcaatgccatgataccctgtaagcgtgagcctaagtcagctcttctcagggcctttgttaatccaaaggcttttcactccctttataccccagaaatccatcccctgtcaatcctcaaagtctcctggtcctcttctggttttaatccctttaacaccctagtttcagtaccttatcccctctcttataagtcagtagtctcaactggcttttcaacccattcttcaagttaaccctgtataaagcaagctcgaaacaatccctcaaaagtcttgcataggaccctttccataatggctccaacctacaataacccgctcttatctcctcctacatgttgagtatccctgttctgaaaatccaaaatgctccaatgagcatttcctttgagtgtcaagtcagcactcaaaaagtttcagatttttagagcatttcagattttggatattcagattagggatactcaacctgtattaaaacccatactgctttatcacaggattttctgatgctatttctcctacctaaagcccatctctaccatttgcaaccctagccatcaagatgcactttttttttctgagaacactttggtggattttaagacacacacacacacttctagatgtaattcttcaccctctactcccatggaagtgatcgtttcttctcttaaacaccgtatcactcactatctgtcatggcaatcaatcattacagtgtattccatgtactttttgccttatcttagagcagaggtgtaccattccttagagcatttggatttcccctgtagcggttagcatagtgccttgcccgtggtgaacattctgatccaccaatagtttttctattggaatctttcagagctttcaggaagctagaacagtcgcttctgctgttactaaagtttcccccgcaatctggctttcagtctcatccttgagttcacttacattgaagagcagagaaggcactggtgtgaaccgctcaacatggatcatgcagatggcatcagggagatggccttctcttgagcccacaaagaaaagcctatgttaggtaagataggagaagctgagaaaattggtggacacggtgcagcctggttcacctgccacatggccctccctctctgccatcccttccttcaaaagtatttggataatatggactggagctcagtattaagattaatgacaactgcaggcttctgctagaaacaagaagaaagaggttgtggtatcggttggagaacacaagtaatcaaaggctgggtcctgtaagttctgtccactgcatagccctttgatgatacacccctcacaaaagttgccactcttacctagaagcagccacaatggaggcattgaggccaccaaaacaggataatgcaactgacagtggaattatccagttaaatattccaaatatctgatctgcaaaagtctaagggaaaagaatggaagagtcattagcaggatctaaaagggatgaaagacatggatgggcatgcccccagattccccttattaggtattccaacctttcttccacagtggggttaacaggaccttcttgcaagcccggtattctaaatgaactcctttcaaggctgtctaccccctttccaggactttcaagagccagaatatacccagtaccccacaagacaccctcaaccttctgctagtgaaaatcctttaccacagcaacagcatcactggccaagatgtctctcatgtctagcacagtataataggccacattggtcaagatatagatgatggtgacaatgggcatggagatgccaatggagaggggcaggttcctacagccaaatagaataaaatgcacattagtcccacagtcatatccctatctctcctttaatccttagactctccctgccacaccggtctttccagggatggagactgttgctacatttcctcaatgcatttgtctttgacggtgccctggatagtggctgaagctctgaacacttaagaactaaagaacattaggggaaaggaatatcatattaggagacaggactgtgcagctgggagcagtggctcatgcctgtagtactaacactttgggaggctgaggcagggagatggctcgagtctaggagttggagaccagcctgggcaacatggcaaaaccctgtctctacaaaaaactagccaagcagctgggcgtggtggctcacgcctgtaatcccagcactttgggaggccgagccgggtggatcacctgaggtcaggagttcaagaccagcctggccaacatggcaaaaccctgttcctactaaaaatataaataattagccaggcatggtggcatgcacctgtagtcccagctactcaggaggctgaggtacgagaatcacttgaactcgagaggcggaggttgtggtaagccaaaattgtgccactgcactccagcatgggcgacagagcgagactctgtctccaaaaacaaaccaaaaaaaaaaaaattagccaagcgtggtggtgcatgcctgtaatcccagctatttgggaggctgaggtgggaggatcacttgagcctggggaggtcaaggctgcagtgaaccatgactgggccactgcactccagcctgggcaaggcagccagaccctgtctaaaaaaaaaaaaaaaaaaaaaaaagcagggcgggggggattaacaaagactgtccccagcatcataacgcacaggaaaatgggaggttgttttgttttataccccaaagatcttttggtgtcaggattccatctctaagattatcaacattggcaattttgcctcaaggttgagaaatataaaaagaaattatggaggcaaattgtgaaatttaacatcttcagagaataagataggccttcagtaggaagagaagtgtatgtatctgactagcagcctggaagatatgtctgcccaccccttcctcagtttgagaacctcaggagccatcctaactggtgggcaaaagaaagatgcaaagagctctcaaggtccctgtagcccaataaagccatgatctttataagcatccttaacagtaaggctgccaaaaaaaaagcacaaagtggggcaaatactctgcaaatagagtcatgcagtttctgtccggtaggtggaagtaccacccaggccttgatcctgcttctgttatctctgttcccatagcgttaccactagttgtgtaccaagagtgctcttctgtttctcaagccaaaaggagtttattggtataagaattgtgattcttttcacttaagcatttacagaaagctgggcacagtggctcatgcctgtaatcccagcactttgggaggctaaggcgggcggatcacctgaggtcaggagttcgagaccagcctggccaacatggtgaaacccatgtctctactaaaaatacaaaaattagccaggcgtggtggcaggcacctgtaattctagctatttgggaggctgaagcaggagaatcacttgaacctgggaggcagaggttgcaatgagccaagatcacgccattgcactccagcctgggaaatacagcaagactctctccaaaaaacaaaaaacattttaccgaaactccactccctggcaaatcttagttcccagaatcatagaattttagagccaggaaaggccatggagatcacagaatttaaccccctcaattacagataaggaaacaggcaaagagatggccgggcaactccctcaaggttagccaacaagtcagtggaaagatcaactctaggtccttgacttcctgtccagttctcttttcactctatatatagactacagagcaataatggtagggtgacttaattgaatgactgaaactataccacaatgtcagtatgaatttaggaaacaaggaaggtatcagagggaaacacaggaaggtttctggaagtctatatcccaaagctatgtatgtggggataagggtggataaaatatctatcaaggaaaatctgttttaaaaacatacataagcatataatacaacctgctttaattaatgcagaaattaatgaacaaatgtaaaaatgcctttaaaaatttacaaagcatacatgagtaagttcatattttagccctgttactgtgatcatagacaagttacttctctgagcctcaggcctcccatctattaaaatgaggctggtaaaattaacctcatagtggttgtggtatgctgtctggcacgtagtaggagctcattaaatgatggctatcactgctatggaaagttggtggtgcagtacctacctctcaggattcttgatctcttcagtgacatagttgagggtgtcccagcctgagtaggagaacagagctgagtacagtgccagggcaatgtcacccactgcaaatgatgaaccctcaaaggaattctcaaaatgagtagaggctcctggaacccaagaacattggaaggcaggggattagtggctcattctcccacttcaagatggtcaagtaaaggactgacagaatatggtaatataatagcaggtaagtggcctacaacacctttggcagcaagagtaccagtaagggaacaggaaacagaagagagacgtctatagagatagaccagaatgccctgcatcctaatgacatagatggggatcttgacaggaagggtccagggtagctttctaggataagaaaccaccatagagcagaaaagctggagaatagaaacaatgcagttctgttctgctctgcaggctgcctgattcctgcctcctatcacaatctgccaaaggcagctcccagggcatggctgtcaaccctttgccaagatcagcctcctctgggaggcagcgtgcatggaagttaaaggacagacttttgggtcagttgtcctggatacaaatttcaactcctctacttaccggtagcaacttgggcaagatatttaattcttttttttttttgggggggggacagagtctcgctctgtcgcccaggctggagtgcagtggcgtgatctcagctcactgcaaccaccgcctcctggattcaagcgattctcctgcctcagcctcccgagtagctgggattacaggcgcctgccaccatgcccggctaatttttgtatttttagtcgagatggggtttcaccatcttggccaggctgatcttgaactcctgacctcatggatccacccgcgatggcctcccaaagtgctgggattacaagcacgagccactgcgcccggcccaaggtacttaattctgcaggctgtttcctcatccataaaatgagaataataatagtgcccaccgaataaggttatagtaagaaatgagataatgcacaaagagcacttagaggagtgcggctcacagaaaatgcttaaaaaagattagttgctactaatattatttcttaccctggccaagtctaacaatgcctgcaacgatgaccgcgatcagtgccaatactttagcataggtgaaaatatcttgtaccagggttccccatttgacataggcacagttaatgaaggttaagagacctgaaagaaaaataatactgattggtgacttacccttaccaccctagggccttagactcccaagcaatttttccagtaccagtcaccaagatatatatacccttcagccaaagacagaccctctgacctgctctgcactggaaccctcggggccccagaatgtcctcaccattatcatacaaaggcctctatactccccacccccagcaccttatatgggagacacaaaacaaagtgactgcagatctgcttacataaaaaatacatccaaatgtccaatcacagcagtgggaggcaactgggaactgtacaggattagtgattgttccggctcttggctctgaaaagtcatggtctctccctcctacctcccattccccatgggctccaggacacagcactctgactctgtggtattactgttaaccttgaggagttctgctgtgacttatccaatgctgagccagcaggtcaggctgtgtggccaaggattaggatgaaggccagacttcctgcccactgcctggcagctcagctgcctgcttttgtgcttggaaagattcttgcagctaagagtggttcctgtagaatggggacagggcatttttcctgatgggacaatagagaagtaagagccacacacattcccccagtccttctactcagaagtacaggttttaaaagtaccttttatcagggttcttaactagggcctccatgaggctcgaaattctctttcaaagtgttatgtccatatgaatacagacatacctaagaaaaagtttcatatcttttcttagaaagggatcatagcttttatcagaatctcaagtccattatccctcccccaacaaaaaagttacaatctacgacttgaatttgaattacttgaagaagttcaacaagggaggctcacgcatgctgtgaggttgaccagtagccccagaatgtggccgagaagaaagttggaaaaaaaaatacagatcttcccactggtagcatagcgaatcgcttcattgctccctccttcccagctcagcaactggaacactataaggagggcttaactttaaagcccttctcccaagggctccaagggcaaggtcaacatcaccctgccttaccagtcaagagaatgaggcctagtacagttcttgcctacttcaggccaccaacacagtcagaaacaccctctgagttctcctggcagtggtgtggccttggtgtcgctagtcctcctattttgtggtgtcctggcctcaccacattctggctacttcatcctgagaagcagggaagtctggcctctcagaacagctgccccatcttctctctctcaccctcccttccaccaccaccctcattctactgactgcccaagttcctttctgctcttcctgagaaggcacattcctgtcctatataaatgcttgcctttctgcctaataaacaacaaaccttatcacagggctgggcaaaaatgtacccacagctccaggccaccccagtgctaagttaataatttaagacacaagtgtgcagcaccccacaaaatgaccaaagtggctgtatcttgccctccacaaatctttcaaatctgtcactcctcctcagccagtcacccatcctttactccccactggactccagcctccagccactcaacagcttagtgccccttctccccagcttgtaacctctgcccttatcctaggctctgcggctggctcataaccacaacatagccaggtttccaagtagaaacaccagacacaaaggatgctgccacattgtcaggaaaatgggatccccaaatacaaatttatgattccctgcagggtaaccatgagtcataacaccaaactggaataagcttacaggactagctctagttcagactcagagtctgagctgtgtgccacaaggttcttctcagttctgtccagggatgtaggcagggaaaaggagggataagcaaccaattcaccacctgctaccacagcagattctgaaatggaaatacatggcttgtttatattttattttatttatttttctttttctttttgagacagagtttcacccttgttgcccaggctggagtgcaatggcgtggtctcggctcatggcaacatctgcctcccgggttcaagccattctcctgcctcaacctcccaagtagctgggattacaggtgtgcgccactatgcccagctaatttttatatttttagtagagatgaggtttcaccatgttggccaggcttgtcgcaaactcctgacctgaggtgatccacccacctcagcctcccaaagtgctgggattacaagcatgagccaccgcgcccggcctatattttattatttttttttatttacttatttattgacttatttatttatttatttatttattttatttattttttgagacacagtcttgctctgtcacccaggctgaagtgcaatggcatgatcttggctcactgcaacccccacttcccaggttcaagcaattctcctgcctcagcctcccgagtagctgggactacaggtgtgtgccaccatgcctggctaatttttgtatttttagtagagatggggtttcaccatactggccaggctaatctcgaactcctgagctcaggtgatccgcccacctcggcctcccaaaatgctgagattacaggcgtgagccaccacacccgtccctttttgttttttttttggagatggggatctcactctttcacccaagccagagtacagtggagaaatcatagctcactgcagcatcgaactcctgagctcaagggatcctcccagctcagccaccctagtagctgggatcaaaggtgtgcaccaccatgcccagctaatttgttttaattttttttttttttgagatggagtcttgctgtcacccagcctggagtgcagtggtgcgatctcagctcactgcaacctctgcctccagggttcaagcagttctcctgcctcagcctcttgagtagctaggactacaagtgcccaccaccacacctggctaatttttgtatttttagtagagacagggtttcaccatgttggtcaggctggtctcgaactcctgaccttgtgatctgccctcctcagcctcccaaagtgctgggattacaggtgtgagccaccgtgcctggctgttttaatttttttagagacggggtcttgctatgtggcccaggctggtctcgaactcctggcctcaggcaatccttccacctcagctatctgaggagtaactgggattatagggaagagccatggcacctgggtggcttgtttacattttaatccctattgcttctctacttctttttttttttttttcgagacagtcttgctccgtcccccaggctggagtacagtggtgcgatctcagctcactgcaacctccgcctcctgggttcaagcggttctcctgcctcagcctcccgagtagctagaattacagacattcaacaccatgcccagctaatttttgtatttttagtagagacagggtttcgccatgttagccagactagtctcaaactcctgacctcaggtgatccgcctgcctcagcctcccaaagtgctgggattacaggtgtgagtcaccggcgtggcgtgcccagtctcttctctacttctctatccatccatttgtatccctctctttgtccaccagtatcccacctcccccactcctgagcctgatttctctgacccaccttctagccctgatctgctctctgtactgagcacagaaggctcagtttgaatgaggaagggaatcctacagaaagaaaccagggagcagagggaactgcctgaagagagctagccctcctcttcctcaaagcctagcttcctccagggcctcttgactgtgggagcaggaaatgggtatggcaggcagcagtgctgacagggctttttgtccccacctcagcggatacagctgaccactggccccagagcccagctaagtgcactgctcttgaagtggagcccaacctcctgcttcagggccaaggacaggaggggaccatggggttaggataatatggaggcaactgcaagttaacctcaagggcagagatgccctccccttctacctctaggggcaattcaatccccacccaacactgggccaagtctataagaggataacctgaaatcacctttgacccttgactcggtgcagcagcactcctgctttgaccccagggggagaaaaaaagaatctgcaaagaagtcactcgtggccgggtgcagtggctcacgcctgtaatcccagcactttgggaggccgaggtggacagatcacgaggtcaagagatcgagaccatcctggccaacatggtgaaaccctgtctctactaaaaatacaaaaattagctgggcatggtggtgtgtgcctgtagtcccatctacttgggaggctgaggcaggagaatcacttgaacccaggaggcggaggatgcagtgagccaagatcacaccactgcactccagcctggtgacagagcaagactccatctcaaaaaaaaaaaagagaagtcactcctataaccatctaaaaagatgttcctgaatggatcatcaaacccagcctacatacggtccccgggagtaggagactagttctagtggtaaggcccagcatcagcgctagaactaaaagccagaaagcaccagaccaggtggatccagaacagaacaaagcttgcaggcccactctggatcagatgctcaggtttagtttagacacctaaatgaaacatttcctgaaaaagaacattaaacccacaattctgtaagcactattacctttaaatacacacaatgtaacacacaaaacttatgattacaggcgtgaaccaccatgcccggcgtcattccattttaaaagtgatctatagagccaggcgcggtggttcgcgcctgtaatcccagcaccttgagagactgaggcgggcagatcacttgaggccaggagtttgagaccagtctggccaccatggcgaaaccccgtctctactaaaaatataaatattagctgagtgtggtggcgcatgcctgtaatcccagctacttggaggcagaggtaggagaatcatttgaacccgggaggcagaaattgcagtgagccaagatcacgccactgcactccagcctgggtgacacagtgagactccatctcaaaaaataaaataaaataaagtgatctatagctcttccttttactaagccaacagcgtcttcctcccagcttctaccagtagtgccagacccctcctctgtctccacacagaatgaagctaaatcctcttccacccaatggcccttcttaacattaaagatgaatatcacggccaggcgctggctcacgcctgtaatcccagcactttgggaggccaaggcgggcagatcatctgaggttgggagttcgagaccagcctgaccaacatggagaaactccgtctctactaaaaatacaaaaattggccaggcgtggtggcacatgcctgtaatcccagctagtcgggaagctgaggcagaagaatcacttgaactcgggaggtggaggttgcggtgaactgagatctcgccattgcaccagcctaggcaacaaaagcaaaactccatctcaaaaaaaaaaaaaaaagccaggcgcggtggctcacgctgtaatcccagcactttgggaagctgaggcaggcggatcatgaggtcaggagatcaagaccatcctggctaacacggtgaaaccccatctctactaaaaatacaaaaaattagccgggtgtggtggcaggcgcctatagtcccagacactcaggaggctgaggcaggagaatgacgtgaacccgggaggcggagcttgcagtgaaccgagattgcgccactgcactccagcctgggccacagagcgagactctgtctcaaaaaaaaaaaaaaaaaagccaggtgcagtggctcacgcctgtaatctcagcactttgaaaggccaaggcgggtggatcacgaggtcaggaaattgagaccagcctgcccaacatggtgaaaacctgtctctactaaaatacaaaaattagccaggcatggtggcacaagcctgtagtcccagctactcgggaggctgaggcaggggaattgcttgaacccgggaggcagaggttgcagtgggccgagatcacggcactgcactccagcctggccacagagcaagactccatctaaaaacaaacaaaaaggatgaacatcctgtccccttgagtctttactccttcaggctaaaacccagattttacaaccccttgtggagcaaatgtggcttccagacccctcaccatcccaggactgtcatttatttcactttgtcatttactgcatatacttcactgtgtcagtatttccccagaaatgcaagaccccacacagaaaactccagaccgtgttgccgactacggagtctcaacctgaaatcattgtttactacaactcctttctttcccacctcaaagtgatgagatctttcctcccctctttctggacctataaaaatgatttttttagctgggtgcgatggctcatgcctataatcccagcattttgggaggccgaggttggaggatcgcttgagtccaggagttcaagaccagcctgggcaacattgtgagaacacatctccacaaaacattttttttagttagccagacatggtggcacacacctgtggtcccagctacttgggaggttgaggcagggggatcgcttgagcccaagtggtcaaggctgcagggagctgtgatcgcaccactgcactgcagcctgggcaacacagtaagatcctttctccaaaacaaaaaaagtgattttttccccccagatacaggacttcatatttagtcttagtgactttcctctgagtttttatgcattattcttatatgatatgggatttttccttcttcattttattagttcaaatcccttctttaattttgtgaaatctgcaaatttgatcagcatacctcctgagtcttcactgaagtcaccctaaaaatgttgactagggccgggcgcagtggctcacgcctgtaataccagtactttgggagaccgaggagggaggatcacctgaggtcaggagtttgagaccaggttggccaacatagtgaaaccccgtctctactaaaagaacaaaaattatccgggtgtggtggtgggcacctgtagtcccagctactcgggaggctgaggcaggagaatcgcttgaacccaggaggcggaggttgcagtgagccaagattacaccactacactccagcctgggcgacagagtgagactccgtctcaaaataaataaataaataaataaatgttgacatgggctggcagcagtggctcacgcctgtaatcccaacactttgggaggctgaggcaggcagatcacttgaggccaggagttcgagaccagcctggcaatatggcaaaaccccatctctactaaaaggaaaatgcaaaaattagcagggtgtgatggcacacgcctgtggtcccagctactcaggaggctgagacatgggaattgtttgagcctaggaggcagaggttgcactgagccaagattgtgccactgcactccagcctaggtgacagagcaacactctgtctcaaaaaaaatttttttaataaaaaaattaaaatgttaggccgggcacggtggctcacgcctgtaatcccagcactttgggaggccgaggcaggcagatcacaaggtcaggagatcgagaccatcctggctaacacaatgaaaccccatctctactaaaaatacaaaaagttagccgggcgtggtggcgggtgcctgtagtcccagctactcgggaggctgaggcaggagaatggcgtgaacccgggaggcggcggttgcagtgagccgagatcgcgccaccgcactccagcctgggtgacagagcgagagttcgtctcaaaaaaaaaaaaattaaaatgttgactaagatcaacagagctgtatagtctatcactgtagacctttctgtatttgtcattattccacaatgttattcagccaactaagaatctaccaaactttatttttatctagtctaccttgtcaacaagaatatcatgagaatttgccacgaacctctccgaaatctgcatacacatgcctctgctctaacaatctaatgatgctatcaaacaattcaaatcaaattagtatatatttatgtagaatattcatagttacacccttgcagtagtcaaaaactagaaacaacccaaatgcccagcaacagtagattgaataaatactaaacagcactaagaataaacaatctgtaatcctagcacgttgggaggccaaggcgggcagatcacaaagtcaggagtttgagatcagcctggccaacatggtgaaacccccgtctctactaaaaatacaaaaattagctgggcgtggtggcgggcacctgtcatcccagctactcaggaggctgaggcaggagaatcgcttgaacccgggaggtggaggttgcagtgagccaagatcctaccactgcactccagcccgggcgacagagtgagactctgtctgggaaaaaaaaaaaaaaaaagtgaacaatctacgactacagacaaaaatacagaagaatctcaaacataataagcaagccagatgcaaaagtgtacatatagattatatccatttacataaaatcagagaaaactaatcaatgctactagaagtcagaatagtgatttccctttgtgtggggtggagaggcagggactgggaagagcataagaagggctcaagggtgctagttacacatgtgctcaactagtgacaattcattaagccataaacttatgagattgcactgttccttctgtatattatatttgaataaaaaaattaaaattgaaccaaaaagtgaggttagcagagtatggcttgttcttagtgaattcatacacgttactaatgatttcccacccttctgctcgtacttcactaaccagatttaacttacaagcctagaatttgggcaagaatccaccttaagttatcacttcagagtgctgctcatccacctccggtggaaagctgggctatcacttgtggtaggtagactaatggccccccaaagatgtccaccccctaatccctggaacctgtgagccatgttatattgcatggcaagggagaattaaagttgcagatagaggccaggcgcagtggctcatgcctgtaatcccagcactttaggaggccaaggcgggcagatcacctgaggtcaggaattctaaccaacatgagtcagcctaaccaacacggtgaaaccccgtctctactaaaaatacaaaaaatagctgggtgtggtggtgggtgcctataatcccagctactcaggaggctgaggcaggagaattgcttgaacccaggaggcggaggttgcagtgagccaagatcacaccactgcacttcagcctgggcaacagagcaagactctggctcaaaaaaaaaaaaaaaaaagaaaaaagttgcagacagaatgaagattgctaatcaagtgacaaaacagggaaatcattctgtattctctgggtgggcccaatgtaatcacaaaagttcttaaagatgaaagagggaggcagaaaggtcaatgtcagagtagtacaatatgagaaagactctcccagttactgctgactttgaaaatggaagggtccatgagactctagaagctgggaaaggcaagaagatggatcctctccttaagcctccagaaagaaacacagtgctacttcatattagcccagtgagacccatttcagacttctgacctccagaattatgagatgataaatttgtgttgttttcagccactcaattggtggtaacttgttagagaagcaatagaaaactcatatgttggctgggcacagtggctcgctcctgtaattccagcactttgggaggccagggtgggctgatcccttgagctcaggagtttgaaaccagcctgggcaacatagagaaaccctgattctacaaaaaatacaaaaattagctgggcctggtggcgtgcacctgtagtctcaactactcaggaggctaaggtgggagaattgcttgagcctggggaggtcaaggctgcagtgatccttgattgcaccactgcattccagcctgggtgacagagcaagactgtctcaaaaaaaaaaaaaaaaaaaaaaaaaaaacctaactgcaggcagaaaactggaagtagcactgggtggtactattcattacatttgttgaaaaatggagaaaggggaagtgaaacccttgacagctcactggatcttggtgtactgaaatttccctctcactgcaatcaaaagaatctaaatgtgaccttatgcaaagaaggcaggcatcccttatgatagcagatcctcaaacaagtatgtacctctctctttaatgtactacatgaatcccagctcttctagcaaatcatcatttttgaacaaagtatactctttcattatcatattctaatcaaatatcgctgatgcctatgaaattgtttcctcctttcagtaaaaggtcaaatacgggccgggcacagtggctcatgcctgtaatcccagcactttgggaggcggaggcagacgaatcacgagttcaagagattgagaccatcctggccaacatggtgaaaccccgtctctactaaaaatacaaaaattagctgggtgtggtggtgtgcgcctgtagtcccagctactggggaggctgaggcaggagaatcacttgagcccaggaggcggaggttgcagtgagctaagatcgcgccactgcactccagcctggtgacagagcgagactccgtctcacaaaaaaaaaaaaaaaaggtcaaatacgtttattagccttacttgtaatatttgtagataagagttcaaaagcatcatttctgatcttccatcccattttctccaaatgcgttactgagcaactcctctctgcctttattctctgctatgtagtctccaaaatacccagatttatacttttatctaggcatttttctccttgcctctaaaatttccattctaaagccttattatacacatctctcccaatccctataaacctcctctatcccttaccaggagtttatctttctggtatcttagaatcttagaatttacggttaggaactctgttctgtgttcttttttctttcacatacacagccttcagctgacaaagagacgaaaattccacctgccactcagtttgctactttaaacttcacgtcaccagtgagacatctcagctatcttctgactggtgacatcattcatcccacagcaattagcagaaggatagcagtccctaggcttaattggtgtgagcaagctcttggtcacatgttgctcagaaaaactgcacatttctaggttaggctgggtctgtgtatagtcagatgcacactattcctgggggaaggccaaaccccacaactggcatactcaggcctgctaataccctggtgtctccaaaatactctaccactgctgtttcctcagaaggtccagatataagctctctggaaacgcctcatatctgttacctaaacccagagatttcaagtctcttcttccttttctttgctgcatccccatttgttttgtctaatgttggtttgggaaaatctctacacctttttttttttttttttaattgagatggagtctcgctctgtcgcccaggctggagtgcagtggcgccatctcggctcactgcaagctccgcctcctgggttcacgccattctcctgcctcagcctcccgagtagctgggactacgggcgtccgccaccacgtccggctaatttttttgtactcttagtacagacggggtttcaccatgttagccaggatggtctcaatttcctgaccccgtgatccacccgccttggcctcccaaagtgctgggattacaggcttgagccaccgcgcccggcctggaaactctctacaccttgaaatcacaatttcaccctggcttctttgatacattatttcttccactctccctaggtgctgttatttctctcagatagcagatggccttcaaattattttacctttcagactacagaaaccttttactccaggtgcagtggctcatgcctataatcccagcactttggaaggccaagacgtgaggatcacttgaggccaggagttggagaccagcctgggcagcatagcaagaccctttctctacaaaaaaattacaaattagctggacttggtggtgcacactgatggtcctagctacttggaaggctgaggtgggaaggtcacttgagtgcaggattgagcccataaccatgctactgcacaccagcctgggcaacaaagcaagacttcgtctcagaaaataaaataacatttttgaccaggcgtggtggtggctcacacctgtaatcccagcattttgggaagccgaagtgggcggatcacctgaggtcaagcgttcatgaccagcctgaccaacatggcaaaaccccgtctctactaaaaatacaaaaattagccagccgtggtggcgcacgcctgtaatcctagctacctgggagtctgagagaggagaatcattttgaacccaggaggcggaggttgcagtgagccgagattgcaccactgcactccagcctggatgatagtgtgaggccccgtctcaaagaaagaaagagagagagagagagagagagagagagaaaggaaaagaaaagaaaaatatcttttttttttttttaaagacagagtctcgctctgtcgcccaggctggagtgcagtggtgcgatcttggctcactgcaacctccgcctcccgggttcatgccgttctcctgcctcagcctcccaagtagctgagactacaggcgcccgccaccaagcccagctaattttttgtattctttagtagagacagggtttcaccgtgttagccaggatggtctcgatctcctgacctcgtaatccgcccgcctcggcttcccaaagtgctgggattacaggcgtaaaccaccacgcccagccaattaaaataaaaattttaaagaaacaaccaattcgcttactcaggtgtcatgggtgagagcctctgtaattgcaaaattttgactgagacagtgaaagagatctaacttaactgactccatcttgcttctaacctccaagctgcctttattcattcccaggcataggctgaactaactttgggagaaacttagtttataatttagacaaagaggataacagccctttcccaaagcagacctccttcttgcctggggactagattgcctttgtaggactaacattagccacaagattagaaattatggtttagggctgggcacggtggctcatgcctgtaatcccagcactttgggagccataggagggcggatcacctgaggtcaggagttcaagaccagcctgggcaacatggtgaaaacctgtctctactaaaaataaaaaataaaattagctgggtgtggtggcgtgcacctgtaaccccagctactagggaggctgaggcaggagaattacttcaactcgggaggtggaggtggcagtgagccaatatcacaccactgcactccagcctgggtgacagagcaagactccatctcgaaaaaaaaaaagaaattatggtttaggagtcacgcagctggaagctacaagattctgaccttccctaaactgctcctaagatcagtgcttgaggtattttgtagaccctgctcttggtggatcagctggcccccacccagatcaataaactggcttagctgatcttgtggcccccacccaggaactgactgagagcaagaagacagctctgattccctgtgatttcatctctaactaatcagcactcctggctcactggcttcccctgacccaccaagttatccttaaaaactctgctcccagaatgttcggggagactgatttgagtaataataaaactccggtctcccgcacagccggctctgtgtgaattactcattattgcaatatccctgtcttgaagaattggctctgtctaggcagtgggcaaggtgaaccccttgggcagttacacctctggcaagaagacacaccaaatgcaatccctgtgggtcactggatcagagtcctcccgctctccttcctggaactcagtcagcactttggtccctgtggctctgaccactctgagggagcaagcaggcagtttgtaccaggagggtcttatagtaacaaccccgtgagtcccttctccaagccgtgtaaatccaatccttattggtttgcttagctaggggtcagttcaagtcctcaggtaccagatctcaagcctgagtgagcatcagtaccacctgaggaatttgtcgacccacaacttcagggccccacaccccagaggttctgatgcaggagacctgagacagtttcgcaggctaatctgaggatctgcttctctgggtgtgtttccttaggtaatcacctacggaaataaccacacacagagcagctgtatcagaacagtcgcaaccctttgctaactcaaggctcctctatcctggctgcaaactagcatcacttgacgagctttaacagtccagtgctcaggccccacccagaccaatgaagtcagaaattctggggtggaacccaggcatcggcatgtttttaaaactccccaggtgactctgaagcatggtgacaattgagaacggcttttcccacctctagtgacacaagaccctcatcaattctcctcaaaagcaatttttctgcttccttaattctcgttctccaagccaattctcatctcattcttctccccagtggttcagatttatgtagtcagggagtgggagtgatgagtattgttttctttctttcttttttttttttttttttttttgagacagcgtctcactctgttgcccatgctggaatgcagtggcacaatcttggctcactgcagcttggaccaaatgggcttaaacaatcctcccacctcagccacctgagtagctgggactacaggcatgcaccaccatgcccaattaattttttttttttttttttgtagagaccaagttctccagactggtctcctgagcttaagccatcctcctacctcagtctcccaaaatgctaggattacaggtgtgagccaccgtgcccaatctgagtattgcttgcttgctttctttctttctttctttctttctttctttctttctttctttctttctttctttcttttctattcttttcttttcttttcttttcttttcttttcttttttaattgagacagagtctcactctgtcgcccaggctggagtgcagtggtgcaatctcggctcactgcaagctccgcctcccgggttcacaccattctcctgcctcagcctcccgagtagctgggaccacaggcgcctgccaccacacccagctaattttttgtatttttagtagagacgggtttcaccatgttagccaggatggtctcaatctcctgaccttgtgatctgcccgcctcggcctcccaaagtgctgggattacaggcgtgagccaccgtgcccggccttgttttcttaattctccagatgattccaatccacagccagagttaggacccactgctgcccagcatcttccgcaacctcctctaggctacctgcccagcttcttctgaggcagagagaaaaagaaaggaacatagaaacatagaacatagaaaggaagagagcaaggatgagcccccaaagggacttgatgatcaaagcagcataaaggtctaccccttcactgctggtcaagagtttgttccaaagttcacaacaaacccacactagaacccaaggctctgatgaaagcctatttcttgaggtgaatatgggccagaaaaggtaagtttcttcacctccaccctcagatggctcttgggaaaagccctctgaaaaaggcaactagcttccaagtagaaggttcaaagggcaaaagtccgttggggggcccagcatctgactgttccacctcattagccacaagtacatgagatcagtcattctggtaccaggagaagctgcacgaggacacctggccaaagctctcagacacacagagatccaaagtccttcacagcccacagcggctctggcagactcagggtaagctgtctgcccccttcccacagcaaccctcagcccccaccagcaccctgaaaggcaaaagcacgaaatacccttctcagccaagttgaacctggaatcatatcttctgttcattcatccagccaacatttattgaagaacccactacatgcaattcactgtggccacatgtgtatgacacgaagaatctttgcctgatccctgaagaacagtactctgtaaacaaagagccctgaactgccaggtactgctgactcactggtacaggggacatactgaaggcatagatggtaaaaatgtcctggtagtgtcctgaatggcaaaacaactaggtctcagtgtgggcaagtgtaggtaaggcaagaacagtcatgtccacctgtgaacagtgggccaaaacaccttggctctgaggaaaggacagtcgggtggagctggacttctggacacctatcctcttgctgagaggaaagttccacctctcttgcaaaacagaaagaaaaggctcagccctcctttctgatccctgagctattgtgaagtaaaatgtaaactgcttttaagtcatccaaagacagcatgcggaaggtaaagcttttagaaatcaataagatgcatatgatatgaatataacttgcagtaatagatactatttttaactgacaactgtgtgccaggtcactatgtacttacacctatcttctaatttaatctgacagagagtaagttttattatctttattttacacttgagaaaactgaggtcaggcagtgactagctccaaagcctacatccattccaccacaccacatacctccctaactgtatgcaagaatgtgagacggggagtgggattatctccccctgtggtaatggagatgcctagaacttcagagcactggggcagtccacgaatttctccaagaagtcagaataagcagcttcaggaggtgccatctgcacacctctctgtttgggaaaagcaaccatttctactaccctagacaggacagtgaggctccttcaaaactcagaattccttcactcactcactcattcattcattcattaagcttatattgagtacccactgtgttccaggccctgtgcaggctctgagattaagatccagtctccagccttcactcaaaagtggacattgacaattacaagaatcagttgctatgaaagtcactgagaggcaacctatctacccacacgtcactggaggagtgaatggggtgcaggcaagcaccaggatcactgttatctggactgagtgcatggaggctgctgctggggtgggggaggggaagcaatattcctgacagagagggcaaaacgttattaccctgacaatgaaatcagcaatgaatgaagtcaaccacccgtataaaaaaacctacttaagcaataaccagtaaatgatttcaaggtctattagtaataccagactatctagggctgtagttcaacagctctaaaggtagactatgcctgccaaaagactgcaaacaactggcaggagcagagactctgtgtttgctctttggaaactgtcatgatttgaatagaaaaagatgaaaatatggtacaaatatagatcacatttctatgaggtagggaccccattttatagaagagagaactgagggctgggcacggtggctcatgcctgtaatcccagcaatttgagaggccgaggaaggtagatcacctgaggtcaggagtttcagactagcctggccaacatggtgaaaccccatctctactaaaaatacaaaaaattagccgggcatagtggtgggcacctgtaatcccagctactcgggaggctgaggcaggagaatcgcttgaacccaggaggcggaggttgcagtaaactgagattacgccactgcactccagactgggcaacaagagtgaaactctgtcaaaaaaaaagaagaagaagaaggagaaggaggaaaaggagaaggagaaggagaacaagaggaaactgaggctaataaatttgacctagcattgattgaatcctgcctgattccacgctgttcaccaccatgcaccagtgccttccaaagggataagggtatcccctacactgttcaagaaaaagaagtctgactcagggcacccaatcattacagccatggagaaggcatcattgtagggtagagatatttcatccaacttttccagaaacatacctcaaccaacctaaggcaggcttaactctttttcataaaatcgtccctcaaccttggtcctttcctctaacaatcaccctccatgctttcagaatcattcatctgaagagcatgtctacattccttcccgttcctgggtctctacaatgcagtctgagatgttgcaactccttcctctttcaccctgcaaaagttttcctttgaccctctgagttgccaattccaaatgacattttattccttattttaaacttaatagctcctccagaaaggctatttttgagtgtaaacctgccacctctggtatgctgcccttgctctgtgctctcacctccccaattaactacactgcattagaacagtgtacatatgtctctcccacccacgagagctgtgtgagggcagagagtggataacagttatccttgtacccatgggcatagtcctgaactagacacacagtaacacttaatacattttgctgggtgaataaatgatatttctgaaacctgatttcaccctcactgccctgaaatttcattgccttaggagaaagcccacatgaaaagccaccagtgaccttcatatcaataaatccaatcaactatactcaatctttacctagcttgacctcttagcagattggacacaggtagtcattcattccttctcaattcactcccttccactcaccatcttccaggtttccacctatctctctagatgctccttctccatcttttcacaaaatacctatccctcaaatgtgggtattcctcagaatgcttctaagcccctttgtcctccctttctacatcttgtcccaaggtcatctcatctgttcctgtggtttctttttctttttatttttttctttcttttttttttttttttttttttttgagacagaatcttgctctgtcacccaagatggagtgcagtggagctgtctcggctcactgcaacctcttcctccagggttcaagcgattctcctgcctcagcctccagagtagctgggactacaggtgcacaccaccatgcccggctagtttttgtatttttagtagagacagggtttcgccatgttggccaggctggtctcgaactcctggcctcaagtgatcagcccacctcagcctcccaaagtgttgggattacaggtgtgagccaccgccctggcctgttcctatggtttcaataaccatatatacaatgatgactcccaaaagtatatcatcagcccaactgtcatgattctagatatatatgaatattcaaccacctactggacattaccaggcacatcaaactcaacatgtccaaaactgattccatcaatttctcccaaacctactgcaccttcggtgttccccatacaagtaactggcgtcaccatccacccatttatgcaagccaaagacctgggcatgttattgtcatcaacaacttccactcatatctactcatagtccaagtcttaagtctccctgtccccaaaacatgactctagtccaagccaccatcatttctcactaggatcatagcagcagcttcccacctgtctcccagctttcaatcctacatagaaaaactaatctttcttaaactcacaaattctaaaatctaaatcacaaatgccactcttctgcttttaaaggccttaagagttttctcattgccttagaagacagcccaccaaactccttaatatagttggtgcaatagattggagttttccaatatgcctcaacgtctcccatcccatattcctttcttacaatgtgactttgacactctacccatcaagaggcagggtctgtacccctcttctcgaaactggatggtcttctgtgaatgcctctacctatagagtatgacagaattgacaccatgcaacttcagagactaggtcataaaaggcaatgcaacttccactttgggtgctacaacactcattctggacgctttcagctgcctgcataagcagtctgactgcccacgagtcaccacgctgtgagaaagctcaacacagtccatacggaaagaccacatggaaagactgacacaatttgataaagaaggccgggtgcggtggctcacacccgtaatcctaacactttgtttgggaggccgaggcgggtagatcacctgaggtcaggagttcaagactaacctggccaacacggtgaaaccccgtctctactaaaaatataaaaattagccgggcgtggtggggcacgcctgtaatcccagctactcaggaggctgaggaaggagaattgcttgaatctgagaggtggaggttgcagtgagccgagatcgcgccactgcactccaacctgcacaaccggagcaagactccacctcaaaaaaagaaaaaaaagaagcccagattgtctgcaacttcctcagcaaccgtttttccagctcctgtcaccatctgctgcaaccacatgagggaccctgacctagaactgtcccactaagcccttcccaaatttctaagccacagaaatcataaaaaaaatgactactgttttaagacactacgttttagactatttgttatagcacaataataactagcacagcttataaagctttgaacaacctatgccttgactctatttacctctgcaagccaactctcaaccttttcttcctgaaattcaacactgcagcccaccctgaactcctttcagtgcctgaaaggagcacttctggcatttaggttttcatacattctgttcttgctgcttggaacactcctcttctactcttgattaattcttcttcgccattcaggtatcagctcaaacttctacaggaatggtttctaaatgcctaggttaggactggtctcctcctgtgccttgttctaccttgcaaatcacaacaccatcacaatccattaaaaccctgtatcagaggccaggcacggtggctcacgcctgtaatcccagcactttgggaggccgaggcaggcggatcatgaggtcaagagatcaagaccatcctggccaacatggtgaaaccccgtctaaaaaatacaaaaattagctgagcatggtggtgcatgcctgtagtcccagctactcaggaggagacaggagaatctcttgaacctgggaagcagaggttgcagtgagctgagattgcgccactgcactccagcctggtgacagagcgagactccgtctcaaaaaaacaaaacaaaacaaaaatccctgtattgggttgcccatcctgaccccggcatgcacccatgcatgcggtcacacacacccacgcacacacataaagtgctccaaaaagacaatgacagtgcagggaacgtggcaacctcttcgcaaatacttgttgaatgtttaatctccaaccctatctctttcctaaattccaaagagcatatctgcctactatgctaaaaataaattccaaattcaacatgcccccatcctcctcctcacagtaaatgatatcactgcctacaaattgtctaaaccagaaacatcatctcttcattcaaagactatttattgagggccgggcacggtaggtggctcacgcctgcaatcccagcactttgggaggccgaggcaggcagatcacttgagttcaggagttcgagaccagcctggccaacatggtgaaaccccatctgtactaaaaatacaaaaattagcagggcggggtgacatgcacctgtagtcccagctactcaggacactgaggcaggagaatcccttgaacccgggaggcagaggttgcagtgagccaagatcctgctactgtactccagcctgggcgacagagcaagactctgtctcaaaacaacaacaacaacaaccaaacaaacaaacaaaaaaaatatttatcaagcttctctgtttccttgctggggatacagtggattatagataggcacagctcttctggcacaaaacttacaagatggtagatgttttccttgacacttccctctcccttatacttgacatcttaataggtctcattggttgtattgattataccttctaaattgtgctcagatctatccttccttgtccaccccaactgccatcaccgtagttcaggtttttgtcatttcctgcctggattgctacaagagcttcctaatagtgtctctgcctccagccttgtcccctaagttccaccccagctatatcactcccctgtttaaagtcctttaatggttcctcatatgctttgaataaattctaaaaccctacaaagatataccttgtgttctagccccttgcccatcttggtcccctcatatcccacaatcccccatgcacccccacaccccatacatttttttcatcttgtgcctttacattggctttccctgtgcctaaaacgtcctgcccccttcttcattcaacatacaattattgagcacctagcagataccaggcactgttctatgtgctggtgattcagcagtgagtaaaacaaagtccttattcacatatgtttatattctagagggaaagagagacaagtaaatgatgtgttgaacactgttataaagaaaaagaggccaggcacggtggctcatgcctgtaatcccagcaccttgggagaccaaggcgggcagatcgcctgaggtcaggagtttgagaccagcctgactaacatggtgaaaccctatttctgctaaaataccaaaattagccaggcacagtggcagcgcctgtaatcccatctacacaggaggctgaggaaggagaatcgcttgaacccggaaggcggaggttgcagtgagctgagatcgtgccattgcactccagcctgggcaacagagcgagacaccatctcaaaaaaaaagaaaaagaaaacaggatggggaactgagagtgaccattttagatacgataggtctctagtaaggtactatttttgcaaagaggtgaatggagtaagggaataagctctgcaggcatctggagacgtgccttccttgcagaagaaacaaatacaaaatccctgagacatgtatgtgccaggaaaatgcaggagaggcaagaaggccagtgtagctggagcagacaaagtgagggcaagaagtccaaggtgaatcaaagaagtcaggtggagtagggccacataggccacggtagaaatgtgggtgcttcagcccagcctgactcctttcatccttcagtgctgatgcagacatcatcccctgaacaagccactctccacccctgcaagcacctgccacatatacatgtttaagtgactatgtctacctcgcttcccaccacactgtgcgttccctacaggcaggggctccacctttcagttccatgctttatagagcccaacatgttcagaaaaaatttctcaaattattcaaactttcttcttttgttccaattccacaccctgcaagcaacttcctgattactagattggtttcccagttactagggtatcagggaggggatgccttgatagtgaacacacaccttctggtcattagaaattactcatgtgggaaaggattccgtatttaataaatggtgctgtgagaactgcctagccatatgcagaaaattgaaactggagcccttccttatatcttatacaaaaattaactcacgatggattcaagacttaaatgtaaaacccaaaactataaaaaccctagaaaaaaatctagggttttatagcaataccattcaggacataggcacgggcaaagatttcatggcaaaaataccaaaagcaattgccaaaaaagcaaaaattgacaaatgggatcttattaaactaaagagcttctgcacagcaaaataaattatcatcagagggaagagacaacctctacagaatgggagaaaatttttgcaatctatccatctgaaaaaggtctaataaccagagtctacaaggaatttaaacaaatttacaagaaagaaacaaacaatcccattaaaaagtgagaaaaggacatgaacaaacacttctcaaaagaggacattcatgcggccaacaaacatgaaaaaaagctcaacagcactgatcattagagaaatgcaaatcaaaaccacaatgagaaatcatctcacgtcagtcagaatgtcaataattaaaaagtcaagaaacagtcaggcatggtggttcacatctgtaatcccagcacttcgggaggctgaggcaggtggatcacctgaggtcagtagttcaagaccagcctgaccaacatggagaaaccccgtctctaacaatacaaaattagccaaatacaaaattagctgggcatgggggtgtgtacgcctgttatcccagctactcaggaggctaaggcaggagaattccttgaacttgggaggcggaggttgcattgagccgagattgtgccattgcactccagcctgggcaacaagagtgaaacttcgtctcaaaaaacaaaaaacaaacaaacaaaaaaaggcaagaaacaacagatgctgacaagtttgcagagaaaaaggaacacctggccaggtgcagtggctcatgcctgtaatcccagcactttgggaggccaaggcaggtggaccacaaggtcaggagttcaagaccagcctggccaagatggggaaactccatatctactaaaaatacaaaaattagccaggtgtggtggtgggctcctgtaatcctagctactcagaaggctgaggcagagaaccactcaaaacaaggaggcagaggttgcagttagccaagatcatgccactgcattccagcctaggtgacagagcaagactcagtctcaaaagaaaaagaaaggtacggcaagtaagaaaatgtggtacatatataccatgaaatagtatgcagccataaaaaggaatgagatcatgtcctttgcagggacatggatgaaactggaagccattatcctcagcaaactaatgtaggaacagaaaaccaaacaccaaatgttctcacttataagtgggagctgaacggtgagaacacatagacaaatgcgggggaagaacaacacacactggggcctgtcggtagaggttggtagagggagggcatcaggaatcatagctaatggatgctaggcttaatacccaggtgatgggttgatctgtacagcaaacaatcatggcacatgtttacctatgtaacaaagctgcacatcctgcacatgtgccctggaacttaaaataaaagtggaagaaaaattaaataaataaaaattttaaaaaaagaaattacccatgtatgctcatcaataaactgtacatacatcaaaggccgagggcggtggctcacgcctgtaatcccagcactttgggaggctgaggcgggcagatcacgaggtcaggagattgagaccatcctggccaacatggtgaaacctcgtctctactaaaaatacaaaaattagctgggtgtggtggcaggagcctgtaatcccagccactcgggaggctgaggcaggagaatcgcttgaagctgggatctcggctcactgcaacctccgcctactgacatagcgagactctgtctcaaaaaaaaaaaaaaaaaaaaaactgtacatacatcagtaaactgacattatcattcacacatcaatctcttttttttttttttttttttttttttgagacagagtcttgctctgtcgcccaggctagagtgcaatggtgcaatctcggctcactgcaacctccacctcccaggttcaagcgattctcctgcctcagcctcccaagtagctgggattacaggtgcccgccatcatgcccggctaatttttttgtgttttagtagagacagggtttcaccatatcgacctctttttttaggtaagcgtgactcaactgctgggaaaatgacccaaatctgtgtcatgacacccaaagaaggcgctgctcatggaagggccacataagcagcctggcagaagacttggatgccctgtctacctcacactcagcccaccttccctattttagatggcagccccatcacccacacctgtccaagctcaaatctctagcttcatgaactctgagagcttccatattccccatacctagaatatatgggtaatggggtgtgcatgaaggattatgggatatgagaaggccaaagcggcaaaagcacaaggcacaccttcctagggatttagattttatcctaaagcatatgaggagccactggaggattttaaacagggagcaacatactggggtggaaacctatgggcaaggctggaggcagggctttacctgtgagagctccccgacccccggcaaaaagtccttgaaagtccactgttaacttttttttttttttttttttgagacggagtctcgctctgtcgcccaggctagagtgcagtggcgcgatctgggctcactgcaagctccgcttcccgggttcatgccattctcctgcctcagcctcccaagtagctgggactacaggctcctgccaccatgcccggctaattttttctgtatttttagtaaagacgggatttcactgtgttagccaggatggtctcaatctcctgacctcgagatccaccagcctcggcctcccaaagtgctgggattacaggcgtgagccaccgcgccgggccaactatttctttattcataccctcatctctgttcctaaggccactccacagtgcagatattcatcacccttcacatggattcaggtttcagctccctaaaccagtctccccaccttctgtctcttgctctttccaaaaacattctccatgtggccaccagagttctccttttaactaagtctcattatttcactagtccccatacccctgcttaataatcagtagctgtgtagctttgtagctcccacctgtaatcctagctactcaggaggtaggaggattacttgaggccaggagttggaggctgcagtgagctatgactgcaccactgcactcctgcctgggcgacagagcaagaacccccatctctaaaaatataaaaataaacaatagcttccccttatcttttagataaagtccaacctgattataaaacccatctcacccagggctgtctcctcgcccttctcccaccccacattccaaccataccaaaccaacgacctggaattctctgaacattctgtaccttgcacctccacacctttgcacatgcagtctcctgtgtgaaaggtcacaggagacagctatatttattttcaaaattcagctcagacaccatgttctctgcgataccttcctaagctatcctcccctacaaaaataaagttgtcccatttaggtcgggcgtggtagctcatgcctgtagtcccagcaatttgggaagctgaggcgggcagttcgcctgaggttaggagttcgagaccagcctggccaacgtggtgaaaccccgtctctactaaaaacacaaaaattagccgggtgtggtggtgcacagctgtaatcccagctgctcaggaggctggggcaggagaatcgcttaacttgggacatggaggttgcgtgagtgaggcgagatcacaccactgcactccagcctgggcaacaagagtgaaacttcatctcaaaaaaaaaaaaagaagttgccccatttgctcttatggtgcctctatcagtgtacaaattatattgcatgacaattatttgttaacatgtcagtctcctttctggactataaattattgaatggcaagggccagacatcattcttctttgtttttcagcactaagtaaaatatctagcacacacatagcatgccctaattaaattttttctaagggagggaatgtatgaaagctctaaattaaagcccttctcttgctaaatctgaagattctgcctaagttctcacttaggctaatcagaatgtcttcataggtcccagcatctgacttgtgtcaggtgcttattcaacagtgcctgaagaccaggcacaatggctcacgcccgtaatcctagcactttgggaggccaaggcaggcagatagcttgagcccaggagtttgagaccagcctgggcaacatagcgagaccccatctctattaaagaaaattaaaaaacaaaaccaaaacagtggctgaaggaataaacccatgaatcatatgtcactaaattcttagtcttggttgcccttctgaaccttctttagatctctatgctcctctgaagttatcaaagatagaacaaagtccagatattatctatgcagtaatatttcatttatctaaccataactactcagatgaagccaagaagcaggaagaggaacaggactataagtgaccaagaaagacagtaatttgaaacataattcataattcatggttttcactgaatctcattccattctcacaacagcctggaattaaacagtcagtgcacctggctcaaggtcacatagctattgagcccaacctcaaacacaagtgtgtgcacaagtgctgtgcacctttcactctatcagagaaatctcaaatgtgtgtcacacatgtgtgtacaaaactctatgcattttactcactgaagagctctgcatacgaaccataactgcggctactttgcatgtattctttttgttttgttttgttttgtcttttgagacagagtctcgctctgtggcccaggctggagtgcagtagcatgatctcggctactgcaacctctgcttcccgggttcaagcgttcctcctgtgtcagcctccctagtagctgggattataggcacccaccaccacacccagcttttttttttttttttgagacagagtctggctctgtcacccaggctggcgtgcaatggcgcgatctctgctcactgcaacctctgcctcccgggttcaagcgattcccctgcctcagcctcccaagtagctgggactataggcacgcaccaccacacccagctaatttttttgcgtttttcatagagacggggtttcaccatgttggccaggatgatcttgatctcttgacctcgtgatccacccatctcggcctcccaaagtgctgggattccaggcgtgagccaccatgcccggccttttttgtatttttagtagagagggggtttcacgatccgcccatcttagcttcccaaagtgctaggattacaggcatgagcgactgcacccggcctttgcatgtattcttacaaggatgtacaggcacgtgaatgtgtacatgggtgaatgaggatttaaacatgtatgtctctatacccaaattagaagcagaaaattggccaggtgcagtggctgtgaaatcccatctcttctaaaaatacaaaaaattagcttggcgtggtggcgggcgcctgtaatcccagctacttgggaggctgaggcaagagaatcgctggaactcgggaggcggaggttgcagtgagctgagatcgcaccattgcactccagcctgggcaacaagagggaaacactgtctcaaaaaaaaaaaaaaaaaaaaaaaagcagcaacagcagaaaattaaaaagggttgactggcagaggtaggcacaaggtcagaatcgaggaacaagagctgtcagaaatgacacagacaaagatagttaaaataatagaattctaaggccgggaaggtggcccatgcctgtaatcccagcactttgggaggccgaggtaggcggattacctgaggtccggagttcgagactagcctgaccaacatggagaaaccccatctctactaaaaatacaaaattagccgggcatggtagcacatctgtaatcccagctactcgggaggctgaggcaggagaatcacttgaacctgggaggcagaggttgcggtgagccaagatcacgccattgcattccagcctgggcaacaagagcgaaactccatctcaaaaaaaaaaaaaaaaatagatttctggtattttaaaggaatgcagccatcttagaaatattacttagatgaaatgatccttctctgcacatgatataattaaccatatgcccacatttgagggtgctccaagaccaatagatcctaaaattagttttgccagtaagcaacctaccagatcatctgcaagtaatgcaagagaaatcacagatcatatttaagacctcagtgaaggctgggcacagtggctcatgcctgtaatcccagcactttgggaggccaaggcgggcggatcacctgaggtcgggagttcaagaccagcctgaccaacatggagaaaccctgtctctaataaaaatacaaaaattagccaggcgtggtggcacatgcctgtaatcccagctacttgagaggctgaggcaggagaatcacttgaacccgggaggcagaggttgtggtgagccgagattgtgccattgcactccagcctgggcaacaagagtgaaactccgtctcggaaaaaaaaaacctcagtgaaaacccccttcttgcaacacaaagcagtgccttccacccctccctgactgttgccatgtatgacaaacatcccatatgcagagatgagtccaggccagacacaaggacacacaaaacacagaaggaccccacagaagacagccagttctctacacaacagtaaaatcagagaagctggaaaggaagttgaggagtgaatggggcaatacagaaattgaaagaaaaaaggacacaaactgattggagagcggtgagccaatgagcaattgcacctggtgcaaaattcctgtgccccaactgctagagcagctgcccctcaaattgacagaatgtctgagcttcttcacagttgcagggtggaaggcatctctaaggtcctaggctctcccaggttggaagggcatttttcaagaatagtggcatctgagggatggggctatggagaatcatcatctcagcacctccaatggctttactgaatgtacagatttaaataatgttttatttatgagatggagaaaaagccaaggtggactgaaatgacagtattaaaaatctagcccacagaggccgggtgcagtggctcacgcctgtgatcccaacactttgggaagccaaggcaggtagatcacttgagctcaggagttcgagtccagcctggccaacacagtgaaaccccgtctccaccaaaaatacaaaaaaattagctaggcatggtggcacatgcctgtaatcccagctactagggaggctgaggcaggagaatcacttgaacccagaagatggaggttgcagtgagctgagattgcaccactcaagcctgggcgacagagtgactctatctcaaaaaaaaaaaaaaaaaaaaaggaagaatccagcctacagaaatactcatgcagctgcaaaaagatattcactggagcattatctgtaagactgagaaactgaaaccaacgtacatggccattaacagaggaccagctagataaataaactactatgcatccttaaaattcacatgaaataatatgaagcattttttaaaaagtagatctgtaagtagaaaagaatgtcactgataatgctagaggaaaagcacactgtagaattacatgtagactagtatgacctcatttttgtaaaagaacaaaactacacctcttttttttttatttttatttttttgagatagagtctcactctgttgcccaggctggagtgcagtggtgcgatcttggctcaccgcaacctctgcctcctgggttcaagcgattctcctgcctcagcctcctgagtagctgggattacaggcacctgccaccacacccagctaatttttgtatttttagtagagatggggtttcaccatgttggccaggctagtctcgaactcctgacctcaggtgatctgcccacttcagcctcccaaagtgctgggattacaggcataagccaccacaccctgccaaaactacatctcttgaaggaacaagaaaaaaaaatcagtgtgcctgtggtccctgctactcaggaggctgaggcaggaggatagcttgagcctagaagttcgaggctgaagtaaggtataatcacaccactgcactccagtctgggtgacagagcaaaatacctgtctctttaaaaaaaaaaaaaaaaaatcaggaagaatatgcaaactgctaatagtgcttactgtgagaagctggggaaaaggtgagtgtttttgcgatacactgtggtactgtttgaattttcacacaaagcatactttaactatatatatatatatatatgttgtcagagacattcctctctatctccttcttactcccagactgcactcacatcccagcctctgtccagccctccacccaccacctcctaccccagccccacttacaaatgcaggcagcagccagcaggcggctggcagcataaggggcgaagcagctcgggaagagaggctgtaccatgtagttggcaaaggtgatggcaatgatggcctggctggtgggctcaatgatgagcagggaggtccagagtctgatgaaagcaaggaatcctccaaaggcctccaggatataggcatagctggccccagatttcttaatggtggtgcccagttccgcataacaaagggccccaaagacggagaagaggcccccgacagcccagatgaccagagagagaccaaaggaggcactgtatatgagcacacccttgggggaaacaaagatgcccgagccgatcatgttccccacaatcaggcacacgccgttaagcagtgagatctccttcttcagcttcacctgctccggccctgggctggccccatcacccaaaggggaggtttccacctcaggctgggaggccacttcatactcagtgctgtcaaccatggtggaggagaggaaacccttcaccagcttcctggcattgccctttaaggaagaaagatgatgctatagattaggtggttggcaattacatagaacctctacccgcctccaacacagggtaatacgggcagctcaccaaccaatgcggagacctccaaataaccttttctccagctcactcatcaaaacaaccccaacttgaatatttgtctatctatctatgtatttatttatttattgacagagtctcgctctgtagcccaggctggagtgcagtggtgcaatctcggctcggctcactgcaacctcagcctcccgggttcaagcgcttctcttgcctcagcctcccaagtagctgggattacaggcacctgccaccacgcgtggctaattttttttttttttttttgagatggagttttgctcttgttgcccaggctggagtgcaatggcgcgatctcagctcactgcaacctccgcctcccgggttcaagtgattctcctgcctcagcctcccaagtagctgggattataggcatgcaccaccacacccagctaattttgtatttttagtagagatggggtttctccatgttggtcaggatggtctcaaactcccgacctcaggttatccgcccgcctcggcctcccaaagtgctgggattacaggcgtgagccaccttgcccagcctccaacttgaatttttaagagaaggcactcattcgccagagagaaaggatctgtctctcatcattaggacattgctgcccacccgactcaccaaatagagaactaaatcttgggccgggcgctgtggctcacatctgtaaacccagcactttgggaggccaaggcgggcagatcacctaaagtcgggagttcgagaccagcctgaccaacatttagaaacccagtctctactaaaaatacaaaaattagccatgcgtggtggcacatgcctgtaatcccagctgcttgggaggctgaggcaggagaatcacttgagcccgggaggcagaggttgcggtaagctaagactgggccattgcactccagcctgggcaacaagagcaaaactctgtctcaaaaaaaaaacaaaatcaaaaacaaaacactaaatgttggttctctctgagcctgctataatacaagacaggcatgggggcagtgtggcggctcccagaaaataactataatggcttgaccccgagttttcagccttatccaaaacccgtcttccctccaatttcagcttcagggatcacctgtgctgaggtacaacattaggaactgaccctaccagcagctaatctgtgggagcgtctcatgacactgctcttttccccaaggactctacgtctgccaaaactaaaggcttcagaaacctgctggaaacccacaaccatcctcctgcccaaagagcatcccttaacccttagctggagtcttcagccctggcaaagcccaagtagacccacttcaccctgaaagaagacaggctattatcttttccttgcttttcctttcccattctctggtattctaagcctcctgctatcgatccctcacatcagcatcgttgaatcacccaaaaaagtatgaatgagagaagggcgatccaatgtaccataaaacctagggatgattggaggcagctgatggccactccctaccccagagttgctgctggagagatatcaccccgagccaaggcagggagacagctgcagccaggcagcacatgctggaaaacaccgaacaggagacagctgagaggaaaatgggagaggctagtcaagcaatggagagatgttagggtgagaggcactcgggagaagaagcgattagacactgcacagcagcaaagaggagggttagcaaggtaagtggagatgagaagagggtggaacgcacactcactccttggtcctggatataagcaggttctcacggcagtgtgagcagcagtcagggagagaagtgccttccaggatctgtggtctgatgctcctccttcccagccagcagtaaaagggaaggccagacaaatgcctatggatttaagcaagaagggtggaggaggtgaggcagcccgcaaaggaaggagtgagggagggggaaaggagtattaagcaaccatctgggtccaaggttcactggcccttcacatctgcaaaaggggcagctaggagctcttggctcagcactttctgtgataagaaggtgctctctcaggaatctcctttgtcagctctgctctgggaccaggggcccagaagaaaggacagtcagctgagtgcagtatctgtagccctggggaagctgtcccagagcaagttagctgaggacaggacagtagcggggaaggaatacacagcactctctctctctgtgtcctccatgccccaccctagcctctcttctctctcaccccaagcatttaagaaagggaggaaggttgcacagtgtgac

SEQ ID NO: 104 - DNA, 46569 bp, Homo sapiens
  source 1..46569: mol_type = genomic DNA
ttaggaacataaacttttattgtcatccagcacctgtgatagtttcatgtctctctaaaggagacaggaaattggagcattgtgggcccttttaaaagaaaagaggagtaggtaggcacacccaggtgcttctaaaacaaccaagcccaaacctgacatgctcctccccacagtcaccttcattgtcccctttaaaagtctggaacagtatgtagcaaaacaaataaattacttttcatttcaaaaagtaagttcaaaggttgaagctgcctaggccaggcttctggacaggtgcctccaaagaagtgagctttccttttcaacttccttagctctagccagtagaccagaaacccctgctttccacatcaggattccagatggtgtttagttagatttgggatcccgttgcttgggcatctctcctccatcttccaaatccatttctgcagcaactgacatacacaggacctggaggtaccttgtggcagaccctacaaagagaactttgagttggaattgagaagaggtcagctgggctgagttcaagtgtcactgaatggaactcagtgtgaggggagtgattccactaagccgaagggttcataagaaggggctaaggcaaagatgtctttggaggctggatttacagaaaaaggcaaaaaccaagctctgcaatagctgagcggacttaaggatgcacggcttacccacgatccttcggaggtaaagcggtcgcttatgttctggcactctgatgatgaggaagtaaaagggcaggcctgagagggcaatggcaatgccgatgagggagttgatagtatcactgtaaagtggaacagccaccaggaagatggtgcagaggcagaagacaatcgggaagaaaacgctgagctaagggcacaggaaacataactggagtggacaactcaggattcttaacagctaaaataaccccacctcccataaggattagcgcactgagccttctttccatacctttaatttcaacacattactaacgaccaagtcccaggcaaaggtttctaaataaagtgctttgtcatagtcccttgtagcaacaactccagctgtttcaggtggagcagaggtaggatggagttgccttaccttgaggggacgaggtcgatcaggctccttccagcgcagataaagctgacccacaatagaaagccccacaaagaaccagtagctgaagctgtagtagttaatgagctggaagatgtcttccacgcacaagtagatcaatgccatgataccctgtaagcgtgagcctaagtcagctcttctcagggcctttgttaatccaaaggcttttcactccctttataccccagaaatccatcccctgtcaatcctcaaagtctcctggtcctcttctggttttaatccctttaacaccctagtttcagtaccttatcccctctcttataagtcagtagtctcaactggcttttcaacccattcttcaagttaaccctgtataaagcaagctcgaaacaatccctcaaaagtcttgcataggaccctttccataatggctccaacctacaataacccgctcttatctcctcctacatgttgagtatccctgttctgaaaatccaaaatgctccaatgagcatttcctttgagtgtcaagtcagcactcaaaaagtttcagatttttagagcatttcagattttggatattcagattagggatactcaacctgtattaaaacccatactgctttatcacaggattttctgatgctatttctcctacctaaagcccatctctaccatttgcaaccctagccatcaagatgcactttttttttctgagaacactttggtggattttaagacacacacacacacttctagatgtaattcttcaccctctactcccatggaagtgatcgtttcttctcttaaacaccgtatcactcactatctgtcatggcaatcaatcattacagtgtattccatgtactttttgccttatcttagagcagaggtgtaccattccttagagcatttggatttcccctgtagcggttagcatagtgccttgcccgtggtgaacattctgatccaccaatagtttttctattggaatctttcagagctttcaggaagctagaacagtcgcttctgctgttactaaagtttcccccgcaatctggctttcagtctcatccttgagttcacttacattgaagagcagagaaggcactggtgtgaaccgctcaacatggatcatgcagatggcatcagggagatggccttctcttgagcccacaaagaaaagcctatgttaggtaagataggagaagctgagaaaattggtggacacggtgcagcctggttcacctgccacatggccctccctctctgccatcccttccttcaaaagtatttggataatatggactggagctcagtattaagattaatgacaactgcaggcttctgctagaaacaagaagaaagaggttgtggtatcggttggagaacacaagtaatcaaaggctgggtcctgtaagttctgtccactgcatagccctttgatgatacacccctcacaaaagttgccactcttacctagaagcagccacaatggaggcattgaggccaccaaaacaggataatgcaactgacagtggaattatccagttaaatattccaaatatctgatctgcaaaagtctaagggaaaagaatggaagagtcattagcaggatctaaaagggatgaaagacatggatgggcatgcccccagattccccttattaggtattccaacctttcttccacagtggggttaacaggaccttcttgcaagcccggtattctaaatgaactcctttcaaggctgtctaccccctttccaggactttcaagagccagaatatacccagtaccccacaagacaccctcaaccttctgctagtgaaaatcctttaccacagcaacagcatcactggccaagatgtctctcatgtctagcacagtataataggccacattggtcaagatatagatgatggtgacaatgggcatggagatgccaatggagaggggcaggttcctacagccaaatagaataaaatgcacattagtcccacagtcatatccctatctctcctttaatccttagactctccctgccacaccggtctttccagggatggagactgttgctacatttcctcaatgcatttgtctttgacggtgccctggatagtggctgaagctctgaacacttaagaactaaagaacattaggggaaaggaatatcatattaggagacaggactgtgcagctgggagcagtggctcatgcctgtagtactaacactttgggaggctgaggcagggagatggctcgagtctaggagttggagaccagcctgggcaacatggcaaaaccctgtctctacaaaaaactagccaagcagctgggcgtggtggctcacgcctgtaatcccagcactttgggaggccgagccgggtggatcacctgaggtcaggagttcaagaccagcctggccaacatggcaaaaccctgttcctactaaaaatataaataattagccaggcatggtggcatgcacctgtagtcccagctactcaggaggctgaggtacgagaatcacttgaactcgagaggcggaggttgtggtaagccaaaattgtgccactgcactccagcatgggcgacagagcgagactctgtctccaaaaacaaaccaaaaaaaaaaaaattagccaagcgtggtggtgcatgcctgtaatcccagctatttgggaggctgaggtgggaggatcacttgagcctggggaggtcaaggctgcagtgaaccatgactgggccactgcactccagcctgggcaaggcagccagaccctgtctaaaaaaaaaaaaaaaaaaaaaaaagcagggcgggggggattaacaaagactgtccccagcatcataacgcacaggaaaatgggaggttgttttgttttataccccaaagatcttttggtgtcaggattccatctctaagattatcaacattggcaattttgcctcaaggttgagaaatataaaaagaaattatggaggcaaattgtgaaatttaacatcttcagagaataagataggccttcagtaggaagagaagtgtatgtatctgactagcagcctggaagatatgtctgcccaccccttcctcagtttgagaacctcaggagccatcctaactggtgggcaaaagaaagatgcaaagagctctcaaggtccctgtagcccaataaagccatgatctttataagcatccttaacagtaaggctgccaaaaaaaaagcacaaagtggggcaaatactctgcaaatagagtcatgcagtttctgtccggtaggtggaagtaccacccaggccttgatcctgcttctgttatctctgttcccatagcgttaccactagttgtgtaccaagagtgctcttctgtttctcaagccaaaaggagtttattggtataagaattgtgattcttttcacttaagcatttacagaaagctgggcacagtggctcatgcctgtaatcccagcactttgggaggctaaggcgggcggatcacctgaggtcaggagttcgagaccagcctggccaacatggtgaaacccatgtctctactaaaaatacaaaaattagccaggcgtggtggcaggcacctgtaattctagctatttgggaggctgaagcaggagaatcacttgaacctgggaggcagaggttgcaatgagccaagatcacgccattgcactccagcctgggaaatacagcaagactctctccaaaaaacaaaaaacattttaccgaaactccactccctggcaaatcttagttcccagaatcatagaattttagagccaggaaaggccatggagatcacagaatttaaccccctcaattacagataaggaaacaggcaaagagatggccgggcaactccctcaaggttagccaacaagtcagtggaaagatcaactctaggtccttgacttcctgtccagttctcttttcactctatatatagactacagagcaataatggtagggtgacttaattgaatgactgaaactataccacaatgtcagtatgaatttaggaaacaaggaaggtatcagagggaaacacaggaaggtttctggaagtctatatcccaaagctatgtatgtggggataagggtggataaaatatctatcaaggaaaatctgttttaaaaacatacataagcatataatacaacctgctttaattaatgcagaaattaatgaacaaatgtaaaaatgcctttaaaaatttacaaagcatacatgagtaagttcatattttagccctgttactgtgatcatagacaagttacttctctgagcctcaggcctcccatctattaaaatgaggctggtaaaattaacctcatagtggttgtggtatgctgtctggcacgtagtaggagctcattaaatgatggctatcactgctatggaaagttggtggtgcagtacctacctctcaggattcttgatctcttcagtgacatagttgagggtgtcccagcctgagtaggagaacagagctgagtacagtgccagggcaatgtcacccactgcaaatgatgaaccctcaaaggaattctcaaaatgagtagaggctcctggaacccaagaacattggaaggcaggggattagtggctcattctcccacttcaagatggtcaagtaaaggactgacagaatatggtaatataatagcaggtaagtggcctacaacacctttggcagcaagagtaccagtaagggaacaggaaacagaagagagacgtctatagagatagaccagaatgccctgcatcctaatgacatagatggggatcttgacaggaagggtccagggtagctttctaggataagaaaccaccatagagcagaaaagctggagaatagaaacaatgcagttctgttctgctctgcaggctgcctgattcctgcctcctatcacaatctgccaaaggcagctcccagggcatggctgtcaaccctttgccaagatcagcctcctctgggaggcagcgtgcatggaagttaaaggacagacttttgggtcagttgtcctggatacaaatttcaactcctctacttaccggtagcaacttgggcaagatatttaattcttttttttttttgggggggggacagagtctcgctctgtcgcccaggctggagtgcagtggcgtgatctcagctcactgcaaccaccgcctcctggattcaagcgattctcctgcctcagcctcccgagtagctgggattacaggcgcctgccaccatgcccggctaatttttgtatttttagtcgagatggggtttcaccatcttggccaggctgatcttgaactcctgacctcatggatccacccgcgatggcctcccaaagtgctgggattacaagcacgagccactgcgcccggcccaaggtacttaattctgcaggctgtttcctcatccataaaatgagaataataatagtgcccaccgaataaggttatagtaagaaatgagataatgcacaaagagcacttagaggagtgcggctcacagaaaatgcttaaaaaagattagttgctactaatattatttcttaccctggccaagtctaacaatgcctgcaacgatgaccgcgatcagtgccaatactttagcataggtgaaaatatcttgtaccagggttccccatttgacataggcacagttaatgaaggttaagagacctgaaagaaaaataatactgattggtgacttacccttaccaccctagggccttagactcccaagcaatttttccagtaccagtcaccaagatatatatacccttcagccaaagacagaccctctgacctgctctgcactggaaccctcggggccccagaatgtcctcaccattatcatacaaaggcctctatactccccacccccagcaccttatatgggagacacaaaacaaagtgactgcagatctgcttacataaaaaatacatccaaatgtccaatcacagcagtgggaggcaactgggaactgtacaggattagtgattgttccggctcttggctctgaaaagtcatggtctctccctcctacctcccattccccatgggctccaggacacagcactctgactctgtggtattactgttaaccttgaggagttctgctgtgacttatccaatgctgagccagcaggtcaggctgtgtggccaaggattaggatgaaggccagacttcctgcccactgcctggcagctcagctgcctgcttttgtgcttggaaagattcttgcagctaagagtggttcctgtagaatggggacagggcatttttcctgatgggacaatagagaagtaagagccacacacattcccccagtccttctactcagaagtacaggttttaaaagtaccttttatcagggttcttaactagggcctccatgaggctcgaaattctctttcaaagtgttatgtccatatgaatacagacatacctaagaaaaagtttcatatcttttcttagaaagggatcatagcttttatcagaatctcaagtccattatccctcccccaacaaaaaagttacaatctacgacttgaatttgaattacttgaagaagttcaacaagggaggctcacgcatgctgtgaggttgaccagtagccccagaatgtggccgagaagaaagttggaaaaaaaaatacagatcttcccactggtagcatagcgaatcgcttcattgctccctccttcccagctcagcaactggaacactataaggagggcttaactttaaagcccttctcccaagggctccaagggcaaggtcaacatcaccctgccttaccagtcaagagaatgaggcctagtacagttcttgcctacttcaggccaccaacacagtcagaaacaccctctgagttctcctggcagtggtgtggccttggtgtcgctagtcctcctattttgtggtgtcctggcctcaccacattctggctacttcatcctgagaagcagggaagtctggcctctcagaacagctgccccatcttctctctctcaccctcccttccaccaccaccctcattctactgactgcccaagttcctttctgctcttcctgagaaggcacattcctgtcctatataaatgcttgcctttctgcctaataaacaacaaaccttatcacagggctgggcaaaaatgtacccacagctccaggccaccccagtgctaagttaataatttaagacacaagtgtgcagcaccccacaaaatgaccaaagtggctgtatcttgccctccacaaatctttcaaatctgtcactcctcctcagccagtcacccatcctttactccccactggactccagcctccagccactcaacagcttagtgccccttctccccagcttgtaacctctgcccttatcctaggctctgcggctggctcataaccacaacatagccaggtttccaagtagaaacaccagacacaaaggatgctgccacattgtcaggaaaatgggatccccaaatacaaatttatgattccctgcagggtaaccatgagtcataacaccaaactggaataagcttacaggactagctctagttcagactcagagtctgagctgtgtgccacaaggttcttctcagttctgtccagggatgtaggcagggaaaaggagggataagcaaccaattcaccacctgctaccacagcagattctgaaatggaaatacatggcttgtttatattttattttatttatttttctttttctttttgagacagagtttcacccttgttgcccaggctggagtgcaatggcgtggtctcggctcatggcaacatctgcctcccgggttcaagccattctcctgcctcaacctcccaagtagctgggattacaggtgtgcgccactatgcccagctaatttttatatttttagtagagatgaggtttcaccatgttggccaggcttgtcgcaaactcctgacctgaggtgatccacccacctcagcctcccaaagtgctgggattacaagcatgagccaccgcgcccggcctatattttattatttttttttatttacttatttattgacttatttatttatttatttatttattttatttattttttgagacacagtcttgctctgtcacccaggctgaagtgcaatggcatgatcttggctcactgcaacccccacttcccaggttcaagcaattctcctgcctcagcctcccgagtagctgggactacaggtgtgtgccaccatgcctggctaatttttgtatttttagtagagatggggtttcaccatactggccaggctaatctcgaactcctgagctcaggtgatccgcccacctcggcctcccaaaatgctgagattacaggcgtgagccaccacacccgtccctttttgttttttttttggagatggggatctcactctttcacccaagccagagtacagtggagaaatcatagctcactgcagcatcgaactcctgagctcaagggatcctcccagctcagccaccctagtagctgggatcaaaggtgtgcaccaccatgcccagctaatttgttttaattttttttttttttgagatggagtcttgctgtcacccagcctggagtgcagtggtgcgatctcagctcactgcaacctctgcctccagggttcaagcagttctcctgcctcagcctcttgagtagctaggactacaagtgcccaccaccacacctggctaatttttgtatttttagtagagacagggtttcaccatgttggtcaggctggtctcgaactcctgaccttgtgatctgccctcctcagcctcccaaagtgctgggattacaggtgtgagccaccgtgcctggctgttttaatttttttagagacggggtcttgctatgtggcccaggctggtctcgaactcctggcctcaggcaatccttccacctcagctatctgaggagtaactgggattatagggaagagccatggcacctgggtggcttgtttacattttaatccctattgcttctctacttctttttttttttttttcgagacagtcttgctccgtcccccaggctggagtacagtggtgcgatctcagctcactgcaacctccgcctcctgggttcaagcggttctcctgcctcagcctcccgagtagctagaattacagacattcaacaccatgcccagctaatttttgtatttttagtagagacagggtttcgccatgttagccagactagtctcaaactcctgacctcaggtgatccgcctgcctcagcctcccaaagtgctgggattacaggtgtgagtcaccggcgtggcgtgcccagtctcttctctacttctctatccatccatttgtatccctctctttgtccaccagtatcccacctcccccactcctgagcctgatttctctgacccaccttctagccctgatctgctctctgtactgagcacagaaggctcagtttgaatgaggaagggaatcctacagaaagaaaccagggagcagagggaactgcctgaagagagctagccctcctcttcctcaaagcctagcttcctccagggcctcttgactgtgggagcaggaaatgggtatggcaggcagcagtgctgacagggctttttgtccccacctcagcggatacagctgaccactggccccagagcccagctaagtgcactgctcttgaagtggagcccaacctcctgcttcagggccaaggacaggaggggaccatggggttaggataatatggaggcaactgcaagttaacctcaagggcagagatgccctccccttctacctctaggggcaattcaatccccacccaacactgggccaagtctataagaggataacctgaaatcacctttgacccttgactcggtgcagcagcactcctgctttgaccccagggggagaaaaaaagaatctgcaaagaagtcactcgtggccgggtgcagtggctcacgcctgtaatcccagcactttgggaggccgaggtggacagatcacgaggtcaagagatcgagaccatcctggccaacatggtgaaaccctgtctctactaaaaatacaaaaattagctgggcatggtggtgtgtgcctgtagtcccatctacttgggaggctgaggcaggagaatcacttgaacccaggaggcggaggatgcagtgagccaagatcacaccactgcactccagcctggtgacagagcaagactccatctcaaaaaaaaaaaagagaagtcactcctataaccatctaaaaagatgttcctgaatggatcatcaaacccagcctacatacggtccccgggagtaggagactagttctagtggtaaggcccagcatcagcgctagaactaaaagccagaaagcaccagaccaggtggatccagaacagaacaaagcttgcaggcccactctggatcagatgctcaggtttagtttagacacctaaatgaaacatttcctgaaaaagaacattaaacccacaattctgtaagcactattacctttaaatacacacaatgtaacacacaaaacttatgattacaggcgtgaaccaccatgcccggcgtcattccattttaaaagtgatctatagagccaggcgcggtggttcgcgcctgtaatcccagcaccttgagagactgaggcgggcagatcacttgaggccaggagtttgagaccagtctggccaccatggcgaaaccccgtctctactaaaaatataaatattagctgagtgtggtggcgcatgcctgtaatcccagctacttggaggcagaggtaggagaatcatttgaacccgggaggcagaaattgcagtgagccaagatcacgccactgcactccagcctgggtgacacagtgagactccatctcaaaaaataaaataaaataaagtgatctatagctcttccttttactaagccaacagcgtcttcctcccagcttctaccagtagtgccagacccctcctctgtctccacacagaatgaagctaaatcctcttccacccaatggcccttcttaacattaaagatgaatatcacggccaggcgctggctcacgcctgtaatcccagcactttgggaggccaaggcgggcagatcatctgaggttgggagttcgagaccagcctgaccaacatggagaaactccgtctctactaaaaatacaaaaattggccaggcgtggtggcacatgcctgtaatcccagctagtcgggaagctgaggcagaagaatcacttgaactcgggaggtggaggttgcggtgaactgagatctcgccattgcaccagcctaggcaacaaaagcaaaactccatctcaaaaaaaaaaaaaaaagccaggcgcggtggctcacgctgtaatcccagcactttgggaagctgaggcaggcggatcatgaggtcaggagatcaagaccatcctggctaacacggtgaaaccccatctctactaaaaatacaaaaaattagccgggtgtggtggcaggcgcctatagtcccagacactcaggaggctgaggcaggagaatgacgtgaacccgggaggcggagcttgcagtgaaccgagattgcgccactgcactccagcctgggccacagagcgagactctgtctcaaaaaaaaaaaaaaaaaagccaggtgcagtggctcacgcctgtaatctcagcactttgaaaggccaaggcgggtggatcacgaggtcaggaaattgagaccagcctgcccaacatggtgaaaacctgtctctactaaaatacaaaaattagccaggcatggtggcacaagcctgtagtcccagctactcgggaggctgaggcaggggaattgcttgaacccgggaggcagaggttgcagtgggccgagatcacggcactgcactccagcctggccacagagcaagactccatctaaaaacaaacaaaaaggatgaacatcctgtccccttgagtctttactccttcaggctaaaacccagattttacaaccccttgtggagcaaatgtggcttccagacccctcaccatcccaggactgtcatttatttcactttgtcatttactgcatatacttcactgtgtcagtatttccccagaaatgcaagaccccacacagaaaactccagaccgtgttgccgactacggagtctcaacctgaaatcattgtttactacaactcctttctttcccacctcaaagtgatgagatctttcctcccctctttctggacctataaaaatgatttttttagctgggtgcgatggctcatgcctataatcccagcattttgggaggccgaggttggaggatcgcttgagtccaggagttcaagaccagcctgggcaacattgtgagaacacatctccacaaaacattttttttagttagccagacatggtggcacacacctgtggtcccagctacttgggaggttgaggcagggggatcgcttgagcccaagtggtcaaggctgcagggagctgtgatcgcaccactgcactgcagcctgggcaacacagtaagatcctttctccaaaacaaaaaaagtgattttttccccccagatacaggacttcatatttagtcttagtgactttcctctgagtttttatgcattattcttatatgatatgggatttttccttcttcattttattagttcaaatcccttctttaattttgtgaaatctgcaaatttgatcagcatacctcctgagtcttcactgaagtcaccctaaaaatgttgactagggccgggcgcagtggctcacgcctgtaataccagtactttgggagaccgaggagggaggatcacctgaggtcaggagtttgagaccaggttggccaacatagtgaaaccccgtctctactaaaagaacaaaaattatccgggtgtggtggtgggcacctgtagtcccagctactcgggaggctgaggcaggagaatcgcttgaacccaggaggcggaggttgcagtgagccaagattacaccactacactccagcctgggcgacagagtgagactccgtctcaaaataaataaataaataaataaatgttgacatgggctggcagcagtggctcacgcctgtaatcccaacactttgggaggctgaggcaggcagatcacttgaggccaggagttcgagaccagcctggcaatatggcaaaaccccatctctactaaaaggaaaatgcaaaaattagcagggtgtgatggcacacgcctgtggtcccagctactcaggaggctgagacatgggaattgtttgagcctaggaggcagaggttgcactgagccaagattgtgccactgcactccagcctaggtgacagagcaacactctgtctcaaaaaaaatttttttaataaaaaaattaaaatgttaggccgggcacggtggctcacgcctgtaatcccagcactttgggaggccgaggcaggcagatcacaaggtcaggagatcgagaccatcctggctaacacaatgaaaccccatctctactaaaaatacaaaaagttagccgggcgtggtggcgggtgcctgtagtcccagctactcgggaggctgaggcaggagaatggcgtgaacccgggaggcggcggttgcagtgagccgagatcgcgccaccgcactccagcctgggtgacagagcgagagttcgtctcaaaaaaaaaaaaattaaaatgttgactaagatcaacagagctgtatagtctatcactgtagacctttctgtatttgtcattattccacaatgttattcagccaactaagaatctaccaaactttatttttatctagtctaccttgtcaacaagaatatcatgagaatttgccacgaacctctccgaaatctgcatacacatgcctctgctctaacaatctaatgatgctatcaaacaattcaaatcaaattagtatatatttatgtagaatattcatagttacacccttgcagtagtcaaaaactagaaacaacccaaatgcccagcaacagtagattgaataaatactaaacagcactaagaataaacaatctgtaatcctagcacgttgggaggccaaggcgggcagatcacaaagtcaggagtttgagatcagcctggccaacatggtgaaacccccgtctctactaaaaatacaaaaattagctgggcgtggtggcgggcacctgtcatcccagctactcaggaggctgaggcaggagaatcgcttgaacccgggaggtggaggttgcagtgagccaagatcctaccactgcactccagcccgggcgacagagtgagactctgtctgggaaaaaaaaaaaaaaaaagtgaacaatctacgactacagacaaaaatacagaagaatctcaaacataataagcaagccagatgcaaaagtgtacatatagattatatccatttacataaaatcagagaaaactaatcaatgctactagaagtcagaatagtgatttccctttgtgtggggtggagaggcagggactgggaagagcataagaagggctcaagggtgctagttacacatgtgctcaactagtgacaattcattaagccataaacttatgagattgcactgttccttctgtatattatatttgaataaaaaaattaaaattgaaccaaaaagtgaggttagcagagtatggcttgttcttagtgaattcatacacgttactaatgatttcccacccttctgctcgtacttcactaaccagatttaacttacaagcctagaatttgggcaagaatccaccttaagttatcacttcagagtgctgctcatccacctccggtggaaagctgggctatcacttgtggtaggtagactaatggccccccaaagatgtccaccccctaatccctggaacctgtgagccatgttatattgcatggcaagggagaattaaagttgcagatagaggccaggcgcagtggctcatgcctgtaatcccagcactttaggaggccaaggcgggcagatcacctgaggtcaggaattctaaccaacatgagtcagcctaaccaacacggtgaaaccccgtctctactaaaaatacaaaaaatagctgggtgtggtggtgggtgcctataatcccagctactcaggaggctgaggcaggagaattgcttgaacccaggaggcggaggttgcagtgagccaagatcacaccactgcacttcagcctgggcaacagagcaagactctggctcaaaaaaaaaaaaaaaaaagaaaaaagttgcagacagaatgaagattgctaatcaagtgacaaaacagggaaatcattctgtattctctgggtgggcccaatgtaatcacaaaagttcttaaagatgaaagagggaggcagaaaggtcaatgtcagagtagtacaatatgagaaagactctcccagttactgctgactttgaaaatggaagggtccatgagactctagaagctgggaaaggcaagaagatggatcctctccttaagcctccagaaagaaacacagtgctacttcatattagcccagtgagacccatttcagacttctgacctccagaattatgagatgataaatttgtgttgttttcagccactcaattggtggtaacttgttagagaagcaatagaaaactcatatgttggctgggcacagtggctcgctcctgtaattccagcactttgggaggccagggtgggctgatcccttgagctcaggagtttgaaaccagcctgggcaacatagagaaaccctgattctacaaaaaatacaaaaattagctgggcctggtggcgtgcacctgtagtctcaactactcaggaggctaaggtgggagaattgcttgagcctggggaggtcaaggctgcagtgatccttgattgcaccactgcattccagcctgggtgacagagcaagactgtctcaaaaaaaaaaaaaaaaaaaaaaaaaaaacctaactgcaggcagaaaactggaagtagcactgggtggtactattcattacatttgttgaaaaatggagaaaggggaagtgaaacccttgacagctcactggatcttggtgtactgaaatttccctctcactgcaatcaaaagaatctaaatgtgaccttatgcaaagaaggcaggcatcccttatgatagcagatcctcaaacaagtatgtacctctctctttaatgtactacatgaatcccagctcttctagcaaatcatcatttttgaacaaagtatactctttcattatcatattctaatcaaatatcgctgatgcctatgaaattgtttcctcctttcagtaaaaggtcaaatacgggccgggcacagtggctcatgcctgtaatcccagcactttgggaggcggaggcagacgaatcacgagttcaagagattgagaccatcctggccaacatggtgaaaccccgtctctactaaaaatacaaaaattagctgggtgtggtggtgtgcgcctgtagtcccagctactggggaggctgaggcaggagaatcacttgagcccaggaggcggaggttgcagtgagctaagatcgcgccactgcactccagcctggtgacagagcgagactccgtctcacaaaaaaaaaaaaaaaaggtcaaatacgtttattagccttacttgtaatatttgtagataagagttcaaaagcatcatttctgatcttccatcccattttctccaaatgcgttactgagcaactcctctctgcctttattctctgctatgtagtctccaaaatacccagatttatacttttatctaggcatttttctccttgcctctaaaatttccattctaaagccttattatacacatctctcccaatccctataaacctcctctatcccttaccaggagtttatctttctggtatcttagaatcttagaatttacggttaggaactctgttctgtgttcttttttctttcacatacacagccttcagctgacaaagagacgaaaattccacctgccactcagtttgctactttaaacttcacgtcaccagtgagacatctcagctatcttctgactggtgacatcattcatcccacagcaattagcagaaggatagcagtccctaggcttaattggtgtgagcaagctcttggtcacatgttgctcagaaaaactgcacatttctaggttaggctgggtctgtgtatagtcagatgcacactattcctgggggaaggccaaaccccacaactggcatactcaggcctgctaataccctggtgtctccaaaatactctaccactgctgtttcctcagaaggtccagatataagctctctggaaacgcctcatatctgttacctaaacccagagatttcaagtctcttcttccttttctttgctgcatccccatttgttttgtctaatgttggtttgggaaaatctctacacctttttttttttttttttaattgagatggagtctcgctctgtcgcccaggctggagtgcagtggcgccatctcggctcactgcaagctccgcctcctgggttcacgccattctcctgcctcagcctcccgagtagctgggactacgggcgtccgccaccacgtccggctaatttttttgtactcttagtacagacggggtttcaccatgttagccaggatggtctcaatttcctgaccccgtgatccacccgccttggcctcccaaagtgctgggattacaggcttgagccaccgcgcccggcctggaaactctctacaccttgaaatcacaatttcaccctggcttctttgatacattatttcttccactctccctaggtgctgttatttctctcagatagcagatggccttcaaattattttacctttcagactacagaaaccttttactccaggtgcagtggctcatgcctataatcccagcactttggaaggccaagacgtgaggatcacttgaggccaggagttggagaccagcctgggcagcatagcaagaccctttctctacaaaaaaattacaaattagctggacttggtggtgcacactgatggtcctagctacttggaaggctgaggtgggaaggtcacttgagtgcaggattgagcccataaccatgctactgcacaccagcctgggcaacaaagcaagacttcgtctcagaaaataaaataacatttttgaccaggcgtggtggtggctcacacctgtaatcccagcattttgggaagccgaagtgggcggatcacctgaggtcaagcgttcatgaccagcctgaccaacatggcaaaaccccgtctctactaaaaatacaaaaattagccagccgtggtggcgcacgcctgtaatcctagctacctgggagtctgagagaggagaatcattttgaacccaggaggcggaggttgcagtgagccgagattgcaccactgcactccagcctggatgatagtgtgaggccccgtctcaaagaaagaaagagagagagagagagagagagagagagaaaggaaaagaaaagaaaaatatcttttttttttttttaaagacagagtctcgctctgtcgcccaggctggagtgcagtggtgcgatcttggctcactgcaacctccgcctcccgggttcatgccgttctcctgcctcagcctcccaagtagctgagactacaggcgcccgccaccaagcccagctaattttttgtattctttagtagagacagggtttcaccgtgttagccaggatggtctcgatctcctgacctcgtaatccgcccgcctcggcttcccaaagtgctgggattacaggcgtaaaccaccacgcccagccaattaaaataaaaattttaaagaaacaaccaattcgcttactcaggtgtcatgggtgagagcctctgtaattgcaaaattttgactgagacagtgaaagagatctaacttaactgactccatcttgcttctaacctccaagctgcctttattcattcccaggcataggctgaactaactttgggagaaacttagtttataatttagacaaagaggataacagccctttcccaaagcagacctccttcttgcctggggactagattgcctttgtaggactaacattagccacaagattagaaattatggtttagggctgggcacggtggctcatgcctgtaatcccagcactttgggagccataggagggcggatcacctgaggtcaggagttcaagaccagcctgggcaacatggtgaaaacctgtctctactaaaaataaaaaataaaattagctgggtgtggtggcgtgcacctgtaaccccagctactagggaggctgaggcaggagaattacttcaactcgggaggtggaggtggcagtgagccaatatcacaccactgcactccagcctgggtgacagagcaagactccatctcgaaaaaaaaaaagaaattatggtttaggagtcacgcagctggaagctacaagattctgaccttccctaaactgctcctaagatcagtgcttgaggtattttgtagaccctgctcttggtggatcagctggcccccacccagatcaataaactggcttagctgatcttgtggcccccacccaggaactgactgagagcaagaagacagctctgattccctgtgatttcatctctaactaatcagcactcctggctcactggcttcccctgacccaccaagttatccttaaaaactctgctcccagaatgttcggggagactgatttgagtaataataaaactccggtctcccgcacagccggctctgtgtgaattactcattattgcaatatccctgtcttgaagaattggctctgtctaggcagtgggcaaggtgaaccccttgggcagttacacctctggcaagaagacacaccaaatgcaatccctgtgggtcactggatcagagtcctcccgctctccttcctggaactcagtcagcactttggtccctgtggctctgaccactctgagggagcaagcaggcagtttgtaccaggagggtcttatagtaacaaccccgtgagtcccttctccaagccgtgtaaatccaatccttattggtttgcttagctaggggtcagttcaagtcctcaggtaccagatctcaagcctgagtgagcatcagtaccacctgaggaatttgtcgacccacaacttcagggccccacaccccagaggttctgatgcaggagacctgagacagtttcgcaggctaatctgaggatctgcttctctgggtgtgtttccttaggtaatcacctacggaaataaccacacacagagcagctgtatcagaacagtcgcaaccctttgctaactcaaggctcctctatcctggctgcaaactagcatcacttgacgagctttaacagtccagtgctcaggccccacccagaccaatgaagtcagaaattctggggtggaacccaggcatcggcatgtttttaaaactccccaggtgactctgaagcatggtgacaattgagaacggcttttcccacctctagtgacacaagaccctcatcaattctcctcaaaagcaatttttctgcttccttaattctcgttctccaagccaattctcatctcattcttctccccagtggttcagatttatgtagtcagggagtgggagtgatgagtattgttttctttctttcttttttttttttttttttttttgagacagcgtctcactctgttgcccatgctggaatgcagtggcacaatcttggctcactgcagcttggaccaaatgggcttaaacaatcctcccacctcagccacctgagtagctgggactacaggcatgcaccaccatgcccaattaattttttttttttttttttgtagagaccaagttctccagactggtctcctgagcttaagccatcctcctacctcagtctcccaaaatgctaggattacaggtgtgagccaccgtgcccaatctgagtattgcttgcttgctttctttctttctttctttctttctttctttctttctttctttctttctttctttcttttctattcttttcttttcttttcttttcttttcttttcttttttaattgagacagagtctcactctgtcgcccaggctggagtgcagtggtgcaatctcggctcactgcaagctccgcctcccgggttcacaccattctcctgcctcagcctcccgagtagctgggaccacaggcgcctgccaccacacccagctaattttttgtatttttagtagagacgggtttcaccatgttagccaggatggtctcaatctcctgaccttgtgatctgcccgcctcggcctcccaaagtgctgggattacaggcgtgagccaccgtgcccggccttgttttcttaattctccagatgattccaatccacagccagagttaggacccactgctgcccagcatcttccgcaacctcctctaggctacctgcccagcttcttctgaggcagagagaaaaagaaaggaacatagaaacatagaacatagaaaggaagagagcaaggatgagcccccaaagggacttgatgatcaaagcagcataaaggtctaccccttcactgctggtcaagagtttgttccaaagttcacaacaaacccacactagaacccaaggctctgatgaaagcctatttcttgaggtgaatatgggccagaaaaggtaagtttcttcacctccaccctcagatggctcttgggaaaagccctctgaaaaaggcaactagcttccaagtagaaggttcaaagggcaaaagtccgttggggggcccagcatctgactgttccacctcattagccacaagtacatgagatcagtcattctggtaccaggagaagctgcacgaggacacctggccaaagctctcagacacacagagatccaaagtccttcacagcccacagcggctctggcagactcagggtaagctgtctgcccccttcccacagcaaccctcagcccccaccagcaccctgaaaggcaaaagcacgaaatacccttctcagccaagttgaacctggaatcatatcttctgttcattcatccagccaacatttattgaagaacccactacatgcaattcactgtggccacatgtgtatgacacgaagaatctttgcctgatccctgaagaacagtactctgtaaacaaagagccctgaactgccaggtactgctgactcactggtacaggggacatactgaaggcatagatggtaaaaatgtcctggtagtgtcctgaatggcaaaacaactaggtctcagtgtgggcaagtgtaggtaaggcaagaacagtcatgtccacctgtgaacagtgggccaaaacaccttggctctgaggaaaggacagtcgggtggagctggacttctggacacctatcctcttgctgagaggaaagttccacctctcttgcaaaacagaaagaaaaggctcagccctcctttctgatccctgagctattgtgaagtaaaatgtaaactgcttttaagtcatccaaagacagcatgcggaaggtaaagcttttagaaatcaataagatgcatatgatatgaatataacttgcagtaatagatactatttttaactgacaactgtgtgccaggtcactatgtacttacacctatcttctaatttaatctgacagagagtaagttttattatctttattttacacttgagaaaactgaggtcaggcagtgactagctccaaagcctacatccattccaccacaccacatacctccctaactgtatgcaagaatgtgagacggggagtgggattatctccccctgtggtaatggagatgcctagaacttcagagcactggggcagtccacgaatttctccaagaagtcagaataagcagcttcaggaggtgccatctgcacacctctctgtttgggaaaagcaaccatttctactaccctagacaggacagtgaggctccttcaaaactcagaattccttcactcactcactcattcattcattcattaagcttatattgagtacccactgtgttccaggccctgtgcaggctctgagattaagatccagtctccagccttcactcaaaagtggacattgacaattacaagaatcagttgctatgaaagtcactgagaggcaacctatctacccacacgtcactggaggagtgaatggggtgcaggcaagcaccaggatcactgttatctggactgagtgcatggaggctgctgctggggtgggggaggggaagcaatattcctgacagagagggcaaaacgttattaccctgacaatgaaatcagcaatgaatgaagtcaaccacccgtataaaaaaacctacttaagcaataaccagtaaatgatttcaaggtctattagtaataccagactatctagggctgtagttcaacagctctaaaggtagactatgcctgccaaaagactgcaaacaactggcaggagcagagactctgtgtttgctctttggaaactgtcatgatttgaatagaaaaagatgaaaatatggtacaaatatagatcacatttctatgaggtagggaccccattttatagaagagagaactgagggctgggcacggtggctcatgcctgtaatcccagcaatttgagaggccgaggaaggtagatcacctgaggtcaggagtttcagactagcctggccaacatggtgaaaccccatctctactaaaaatacaaaaaattagccgggcatagtggtgggcacctgtaatcccagctactcgggaggctgaggcaggagaatcgcttgaacccaggaggcggaggttgcagtaaactgagattacgccactgcactccagactgggcaacaagagtgaaactctgtcaaaaaaaaagaagaagaagaaggagaaggaggaaaaggagaaggagaaggagaacaagaggaaactgaggctaataaatttgacctagcattgattgaatcctgcctgattccacgctgttcaccaccatgcaccagtgccttccaaagggataagggtatcccctacactgttcaagaaaaagaagtctgactcagggcacccaatcattacagccatggagaaggcatcattgtagggtagagatatttcatccaacttttccagaaacatacctcaaccaacctaaggcaggcttaactctttttcataaaatcgtccctcaaccttggtcctttcctctaacaatcaccctccatgctttcagaatcattcatctgaagagcatgtctacattccttcccgttcctgggtctctacaatgcagtctgagatgttgcaactccttcctctttcaccctgcaaaagttttcctttgaccctctgagttgccaattccaaatgacattttattccttattttaaacttaatagctcctccagaaaggctatttttgagtgtaaacctgccacctctggtatgctgcccttgctctgtgctctcacctccccaattaactacactgcattagaacagtgtacatatgtctctcccacccacgagagctgtgtgagggcagagagtggataacagttatccttgtacccatgggcatagtcctgaactagacacacagtaacacttaatacattttgctgggtgaataaatgatatttctgaaacctgatttcaccctcactgccctgaaatttcattgccttaggagaaagcccacatgaaaagccaccagtgaccttcatatcaataaatccaatcaactatactcaatctttacctagcttgacctcttagcagattggacacaggtagtcattcattccttctcaattcactcccttccactcaccatcttccaggtttccacctatctctctagatgctccttctccatcttttcacaaaatacctatccctcaaatgtgggtattcctcagaatgcttctaagcccctttgtcctccctttctacatcttgtcccaaggtcatctcatctgttcctgtggtttctttttctttttatttttttctttcttttttttttttttttttttttttgagacagaatcttgctctgtcacccaagatggagtgcagtggagctgtctcggctcactgcaacctcttcctccagggttcaagcgattctcctgcctcagcctccagagtagctgggactacaggtgcacaccaccatgcccggctagtttttgtatttttagtagagacagggtttcgccatgttggccaggctggtctcgaactcctggcctcaagtgatcagcccacctcagcctcccaaagtgttgggattacaggtgtgagccaccgccctggcctgttcctatggtttcaataaccatatatacaatgatgactcccaaaagtatatcatcagcccaactgtcatgattctagatatatatgaatattcaaccacctactggacattaccaggcacatcaaactcaacatgtccaaaactgattccatcaatttctcccaaacctactgcaccttcggtgttccccatacaagtaactggcgtcaccatccacccatttatgcaagccaaagacctgggcatgttattgtcatcaacaacttccactcatatctactcatagtccaagtcttaagtctccctgtccccaaaacatgactctagtccaagccaccatcatttctcactaggatcatagcagcagcttcccacctgtctcccagctttcaatcctacatagaaaaactaatctttcttaaactcacaaattctaaaatctaaatcacaaatgccactcttctgcttttaaaggccttaagagttttctcattgccttagaagacagcccaccaaactccttaatatagttggtgcaatagattggagttttccaatatgcctcaacgtctcccatcccatattcctttcttacaatgtgactttgacactctacccatcaagaggcagggtctgtacccctcttctcgaaactggatggtcttctgtgaatgcctctacctatagagtatgacagaattgacaccatgcaacttcagagactaggtcataaaaggcaatgcaacttccactttgggtgctacaacactcattctggacgctttcagctgcctgcataagcagtctgactgcccacgagtcaccacgctgtgagaaagctcaacacagtccatacggaaagaccacatggaaagactgacacaatttgataaagaaggccgggtgcggtggctcacacccgtaatcctaacactttgtttgggaggccgaggcgggtagatcacctgaggtcaggagttcaagactaacctggccaacacggtgaaaccccgtctctactaaaaatataaaaattagccgggcgtggtggggcacgcctgtaatcccagctactcaggaggctgaggaaggagaattgcttgaatctgagaggtggaggttgcagtgagccgagatcgcgccactgcactccaacctgcacaaccggagcaagactccacctcaaaaaaagaaaaaaaagaagcccagattgtctgcaacttcctcagcaaccgtttttccagctcctgtcaccatctgctgcaaccacatgagggaccctgacctagaactgtcccactaagcccttcccaaatttctaagccacagaaatcataaaaaaaatgactactgttttaagacactacgttttagactatttgttatagcacaataataactagcacagcttataaagctttgaacaacctatgccttgactctatttacctctgcaagccaactctcaaccttttcttcctgaaattcaacactgcagcccaccctgaactcctttcagtgcctgaaaggagcacttctggcatttaggttttcatacattctgttcttgctgcttggaacactcctcttctactcttgattaattcttcttcgccattcaggtatcagctcaaacttctacaggaatggtttctaaatgcctaggttaggactggtctcctcctgtgccttgttctaccttgcaaatcacaacaccatcacaatccattaaaaccctgtatcagaggccaggcacggtggctcacgcctgtaatcccagcactttgggaggccgaggcaggcggatcatgaggtcaagagatcaagaccatcctggccaacatggtgaaaccccgtctaaaaaatacaaaaattagctgagcatggtggtgcatgcctgtagtcccagctactcaggaggagacaggagaatctcttgaacctgggaagcagaggttgcagtgagctgagattgcgccactgcactccagcctggtgacagagcgagactccgtctcaaaaaaacaaaacaaaacaaaaatccctgtattgggttgcccatcctgaccccggcatgcacccatgcatgcggtcacacacacccacgcacacacataaagtgctccaaaaagacaatgacagtgcagggaacgtggcaacctcttcgcaaatacttgttgaatgtttaatctccaaccctatctctttcctaaattccaaagagcatatctgcctactatgctaaaaataaattccaaattcaacatgcccccatcctcctcctcacagtaaatgatatcactgcctacaaattgtctaaaccagaaacatcatctcttcattcaaagactatttattgagggccgggcacggtaggtggctcacgcctgcaatcccagcactttgggaggccgaggcaggcagatcacttgagttcaggagttcgagaccagcctggccaacatggtgaaaccccatctgtactaaaaatacaaaaattagcagggcggggtgacatgcacctgtagtcccagctactcaggacactgaggcaggagaatcccttgaacccgggaggcagaggttgcagtgagccaagatcctgctactgtactccagcctgggcgacagagcaagactctgtctcaaaacaacaacaacaacaaccaaacaaacaaacaaaaaaaatatttatcaagcttctctgtttccttgctggggatacagtggattatagataggcacagctcttctggcacaaaacttacaagatggtagatgttttccttgacacttccctctcccttatacttgacatcttaataggtctcattggttgtattgattataccttctaaattgtgctcagatctatccttccttgtccaccccaactgccatcaccgtagttcaggtttttgtcatttcctgcctggattgctacaagagcttcctaatagtgtctctgcctccagccttgtcccctaagttccaccccagctatatcactcccctgtttaaagtcctttaatggttcctcatatgctttgaataaattctaaaaccctacaaagatataccttgtgttctagccccttgcccatcttggtcccctcatatcccacaatcccccatgcacccccacaccccatacatttttttcatcttgtgcctttacattggctttccctgtgcctaaaacgtcctgcccccttcttcattcaacatacaattattgagcacctagcagataccaggcactgttctatgtgctggtgattcagcagtgagtaaaacaaagtccttattcacatatgtttatattctagagggaaagagagacaagtaaatgatgtgttgaacactgttataaagaaaaagaggccaggcacggtggctcatgcctgtaatcccagcaccttgggagaccaaggcgggcagatcgcctgaggtcaggagtttgagaccagcctgactaacatggtgaaaccctatttctgctaaaataccaaaattagccaggcacagtggcagcgcctgtaatcccatctacacaggaggctgaggaaggagaatcgcttgaacccggaaggcggaggttgcagtgagctgagatcgtgccattgcactccagcctgggcaacagagcgagacaccatctcaaaaaaaaagaaaaagaaaacaggatggggaactgagagtgaccattttagatacgataggtctctagtaaggtactatttttgcaaagaggtgaatggagtaagggaataagctctgcaggcatctggagacgtgccttccttgcagaagaaacaaatacaaaatccctgagacatgtatgtgccaggaaaatgcaggagaggcaagaaggccagtgtagctggagcagacaaagtgagggcaagaagtccaaggtgaatcaaagaagtcaggtggagtagggccacataggccacggtagaaatgtgggtgcttcagcccagcctgactcctttcatccttcagtgctgatgcagacatcatcccctgaacaagccactctccacccctgcaagcacctgccacatatacatgtttaagtgactatgtctacctcgcttcccaccacactgtgcgttccctacaggcaggggctccacctttcagttccatgctttatagagcccaacatgttcagaaaaaatttctcaaattattcaaactttcttcttttgttccaattccacaccctgcaagcaacttcctgattactagattggtttcccagttactagggtatcagggaggggatgccttgatagtgaacacacaccttctggtcattagaaattactcatgtgggaaaggattccgtatttaataaatggtgctgtgagaactgcctagccatatgcagaaaattgaaactggagcccttccttatatcttatacaaaaattaactcacgatggattcaagacttaaatgtaaaacccaaaactataaaaaccctagaaaaaaatctagggttttatagcaataccattcaggacataggcacgggcaaagatttcatggcaaaaataccaaaagcaattgccaaaaaagcaaaaattgacaaatgggatcttattaaactaaagagcttctgcacagcaaaataaattatcatcagagggaagagacaacctctacagaatgggagaaaatttttgcaatctatccatctgaaaaaggtctaataaccagagtctacaaggaatttaaacaaatttacaagaaagaaacaaacaatcccattaaaaagtgagaaaaggacatgaacaaacacttctcaaaagaggacattcatgcggccaacaaacatgaaaaaaagctcaacagcactgatcattagagaaatgcaaatcaaaaccacaatgagaaatcatctcacgtcagtcagaatgtcaataattaaaaagtcaagaaacagtcaggcatggtggttcacatctgtaatcccagcacttcgggaggctgaggcaggtggatcacctgaggtcagtagttcaagaccagcctgaccaacatggagaaaccccgtctctaacaatacaaaattagccaaatacaaaattagctgggcatgggggtgtgtacgcctgttatcccagctactcaggaggctaaggcaggagaattccttgaacttgggaggcggaggttgcattgagccgagattgtgccattgcactccagcctgggcaacaagagtgaaacttcgtctcaaaaaacaaaaaacaaacaaacaaaaaaaggcaagaaacaacagatgctgacaagtttgcagagaaaaaggaacacctggccaggtgcagtggctcatgcctgtaatcccagcactttgggaggccaaggcaggtggaccacaaggtcaggagttcaagaccagcctggccaagatggggaaactccatatctactaaaaatacaaaaattagccaggtgtggtggtgggctcctgtaatcctagctactcagaaggctgaggcagagaaccactcaaaacaaggaggcagaggttgcagttagccaagatcatgccactgcattccagcctaggtgacagagcaagactcagtctcaaaagaaaaagaaaggtacggcaagtaagaaaatgtggtacatatataccatgaaatagtatgcagccataaaaaggaatgagatcatgtcctttgcagggacatggatgaaactggaagccattatcctcagcaaactaatgtaggaacagaaaaccaaacaccaaatgttctcacttataagtgggagctgaacggtgagaacacatagacaaatgcgggggaagaacaacacacactggggcctgtcggtagaggttggtagagggagggcatcaggaatcatagctaatggatgctaggcttaatacccaggtgatgggttgatctgtacagcaaacaatcatggcacatgtttacctatgtaacaaagctgcacatcctgcacatgtgccctggaacttaaaataaaagtggaagaaaaattaaataaataaaaattttaaaaaaagaaattacccatgtatgctcatcaataaactgtacatacatcaaaggccgagggcggtggctcacgcctgtaatcccagcactttgggaggctgaggcgggcagatcacgaggtcaggagattgagaccatcctggccaacatggtgaaacctcgtctctactaaaaatacaaaaattagctgggtgtggtggcaggagcctgtaatcccagccactcgggaggctgaggcaggagaatcgcttgaagctgggatctcggctcactgcaacctccgcctactgacatagcgagactctgtctcaaaaaaaaaaaaaaaaaaaaaactgtacatacatcagtaaactgacattatcattcacacatcaatctcttttttttttttttttttttttttttgagacagagtcttgctctgtcgcccaggctagagtgcaatggtgcaatctcggctcactgcaacctccacctcccaggttcaagcgattctcctgcctcagcctcccaagtagctgggattacaggtgcccgccatcatgcccggctaatttttttgtgttttagtagagacagggtttcaccatatcgacctctttttttaggtaagcgtgactcaactgctgggaaaatgacccaaatctgtgtcatgacacccaaagaaggcgctgctcatggaagggccacataagcagcctggcagaagacttggatgccctgtctacctcacactcagcccaccttccctattttagatggcagccccatcacccacacctgtccaagctcaaatctctagcttcatgaactctgagagcttccatattccccatacctagaatatatgggtaatggggtgtgcatgaaggattatgggatatgagaaggccaaagcggcaaaagcacaaggcacaccttcctagggatttagattttatcctaaagcatatgaggagccactggaggattttaaacagggagcaacatactggggtggaaacctatgggcaaggctggaggcagggctttacctgtgagagctccccgacccccggcaaaaagtccttgaaagtccactgttaacttttttttttttttttttttgagacggagtctcgctctgtcgcccaggctagagtgcagtggcgcgatctgggctcactgcaagctccgcttcccgggttcatgccattctcctgcctcagcctcccaagtagctgggactacaggctcctgccaccatgcccggctaattttttctgtatttttagtaaagacgggatttcactgtgttagccaggatggtctcaatctcctgacctcgagatccaccagcctcggcctcccaaagtgctgggattacaggcgtgagccaccgcgccgggccaactatttctttattcataccctcatctctgttcctaaggccactccacagtgcagatattcatcacccttcacatggattcaggtttcagctccctaaaccagtctccccaccttctgtctcttgctctttccaaaaacattctccatgtggccaccagagttctccttttaactaagtctcattatttcactagtccccatacccctgcttaataatcagtagctgtgtagctttgtagctcccacctgtaatcctagctactcaggaggtaggaggattacttgaggccaggagttggaggctgcagtgagctatgactgcaccactgcactcctgcctgggcgacagagcaagaacccccatctctaaaaatataaaaataaacaatagcttccccttatcttttagataaagtccaacctgattataaaacccatctcacccagggctgtctcctcgcccttctcccaccccacattccaaccataccaaaccaacgacctggaattctctgaacattctgtaccttgcacctccacacctttgcacatgcagtctcctgtgtgaaaggtcacaggagacagctatatttattttcaaaattcagctcagacaccatgttctctgcgataccttcctaagctatcctcccctacaaaaataaagttgtcccatttaggtcgggcgtggtagctcatgcctgtagtcccagcaatttgggaagctgaggcgggcagttcgcctgaggttaggagttcgagaccagcctggccaacgtggtgaaaccccgtctctactaaaaacacaaaaattagccgggtgtggtggtgcacagctgtaatcccagctgctcaggaggctggggcaggagaatcgcttaacttgggacatggaggttgcgtgagtgaggcgagatcacaccactgcactccagcctgggcaacaagagtgaaacttcatctcaaaaaaaaaaaaagaagttgccccatttgctcttatggtgcctctatcagtgtacaaattatattgcatgacaattatttgttaacatgtcagtctcctttctggactataaattattgaatggcaagggccagacatcattcttctttgtttttcagcactaagtaaaatatctagcacacacatagcatgccctaattaaattttttctaagggagggaatgtatgaaagctctaaattaaagcccttctcttgctaaatctgaagattctgcctaagttctcacttaggctaatcagaatgtcttcataggtcccagcatctgacttgtgtcaggtgcttattcaacagtgcctgaagaccaggcacaatggctcacgcccgtaatcctagcactttgggaggccaaggcaggcagatagcttgagcccaggagtttgagaccagcctgggcaacatagcgagaccccatctctattaaagaaaattaaaaaacaaaaccaaaacagtggctgaaggaataaacccatgaatcatatgtcactaaattcttagtcttggttgcccttctgaaccttctttagatctctatgctcctctgaagttatcaaagatagaacaaagtccagatattatctatgcagtaatatttcatttatctaaccataactactcagatgaagccaagaagcaggaagaggaacaggactataagtgaccaagaaagacagtaatttgaaacataattcataattcatggttttcactgaatctcattccattctcacaacagcctggaattaaacagtcagtgcacctggctcaaggtcacatagctattgagcccaacctcaaacacaagtgtgtgcacaagtgctgtgcacctttcactctatcagagaaatctcaaatgtgtgtcacacatgtgtgtacaaaactctatgcattttactcactgaagagctctgcatacgaaccataactgcggctactttgcatgtattctttttgttttgttttgttttgtcttttgagacagagtctcgctctgtggcccaggctggagtgcagtagcatgatctcggctactgcaacctctgcttcccgggttcaagcgttcctcctgtgtcagcctccctagtagctgggattataggcacccaccaccacacccagcttttttttttttttttgagacagagtctggctctgtcacccaggctggcgtgcaatggcgcgatctctgctcactgcaacctctgcctcccgggttcaagcgattcccctgcctcagcctcccaagtagctgggactataggcacgcaccaccacacccagctaatttttttgcgtttttcatagagacggggtttcaccatgttggccaggatgatcttgatctcttgacctcgtgatccacccatctcggcctcccaaagtgctgggattccaggcgtgagccaccatgcccggccttttttgtatttttagtagagagggggtttcacgatccgcccatcttagcttcccaaagtgctaggattacaggcatgagcgactgcacccggcctttgcatgtattcttacaaggatgtacaggcacgtgaatgtgtacatgggtgaatgaggatttaaacatgtatgtctctatacccaaattagaagcagaaaattggccaggtgcagtggctgtgaaatcccatctcttctaaaaatacaaaaaattagcttggcgtggtggcgggcgcctgtaatcccagctacttgggaggctgaggcaagagaatcgctggaactcgggaggcggaggttgcagtgagctgagatcgcaccattgcactccagcctgggcaacaagagggaaacactgtctcaaaaaaaaaaaaaaaaaaaaaaaagcagcaacagcagaaaattaaaaagggttgactggcagaggtaggcacaaggtcagaatcgaggaacaagagctgtcagaaatgacacagacaaagatagttaaaataatagaattctaaggccgggaaggtggcccatgcctgtaatcccagcactttgggaggccgaggtaggcggattacctgaggtccggagttcgagactagcctgaccaacatggagaaaccccatctctactaaaaatacaaaattagccgggcatggtagcacatctgtaatcccagctactcgggaggctgaggcaggagaatcacttgaacctgggaggcagaggttgcggtgagccaagatcacgccattgcattccagcctgggcaacaagagcgaaactccatctcaaaaaaaaaaaaaaaaatagatttctggtattttaaaggaatgcagccatcttagaaatattacttagatgaaatgatccttctctgcacatgatataattaaccatatgcccacatttgagggtgctccaagaccaatagatcctaaaattagttttgccagtaagcaacctaccagatcatctgcaagtaatgcaagagaaatcacagatcatatttaagacctcagtgaaggctgggcacagtggctcatgcctgtaatcccagcactttgggaggccaaggcgggcggatcacctgaggtcgggagttcaagaccagcctgaccaacatggagaaaccctgtctctaataaaaatacaaaaattagccaggcgtggtggcacatgcctgtaatcccagctacttgagaggctgaggcaggagaatcacttgaacccgggaggcagaggttgtggtgagccgagattgtgccattgcactccagcctgggcaacaagagtgaaactccgtctcggaaaaaaaaaacctcagtgaaaacccccttcttgcaacacaaagcagtgccttccacccctccctgactgttgccatgtatgacaaacatcccatatgcagagatgagtccaggccagacacaaggacacacaaaacacagaaggaccccacagaagacagccagttctctacacaacagtaaaatcagagaagctggaaaggaagttgaggagtgaatggggcaatacagaaattgaaagaaaaaaggacacaaactgattggagagcggtgagccaatgagcaattgcacctggtgcaaaattcctgtgccccaactgctagagcagctgcccctcaaattgacagaatgtctgagcttcttcacagttgcagggtggaaggcatctctaaggtcctaggctctcccaggttggaagggcatttttcaagaatagtggcatctgagggatggggctatggagaatcatcatctcagcacctccaatggctttactgaatgtacagatttaaataatgttttatttatgagatggagaaaaagccaaggtggactgaaatgacagtattaaaaatctagcccacagaggccgggtgcagtggctcacgcctgtgatcccaacactttgggaagccaaggcaggtagatcacttgagctcaggagttcgagtccagcctggccaacacagtgaaaccccgtctccaccaaaaatacaaaaaaattagctaggcatggtggcacatgcctgtaatcccagctactagggaggctgaggcaggagaatcacttgaacccagaagatggaggttgcagtgagctgagattgcaccactcaagcctgggcgacagagtgactctatctcaaaaaaaaaaaaaaaaaaaaaggaagaatccagcctacagaaatactcatgcagctgcaaaaagatattcactggagcattatctgtaagactgagaaactgaaaccaacgtacatggccattaacagaggaccagctagataaataaactactatgcatccttaaaattcacatgaaataatatgaagcattttttaaaaagtagatctgtaagtagaaaagaatgtcactgataatgctagaggaaaagcacactgtagaattacatgtagactagtatgacctcatttttgtaaaagaacaaaactacacctcttttttttttatttttatttttttgagatagagtctcactctgttgcccaggctggagtgcagtggtgcgatcttggctcaccgcaacctctgcctcctgggttcaagcgattctcctgcctcagcctcctgagtagctgggattacaggcacctgccaccacacccagctaatttttgtatttttagtagagatggggtttcaccatgttggccaggctagtctcgaactcctgacctcaggtgatctgcccacttcagcctcccaaagtgctgggattacaggcataagccaccacaccctgccaaaactacatctcttgaaggaacaagaaaaaaaaatcagtgtgcctgtggtccctgctactcaggaggctgaggcaggaggatagcttgagcctagaagttcgaggctgaagtaaggtataatcacaccactgcactccagtctgggtgacagagcaaaatacctgtctctttaaaaaaaaaaaaaaaaaatcaggaagaatatgcaaactgctaatagtgcttactgtgagaagctggggaaaaggtgagtgtttttgcgatacactgtggtactgtttgaattttcacacaaagcatactttaactatatatatatatatatatgttgtcagagacattcctctctatctccttcttactcccagactgcactcacatcccagcctctgtccagccctccacccaccacctcctaccccagccccacttacaaatgcaggcagcagccagcaggcggctggcagcataaggggcgaagcagctcgggaagagaggctgtaccatgtagttggcaaaggtgatggcaatgatggcctggctggtgggctcaatgatgagcagggaggtccagagtctgatgaaagcaaggaatcctccaaaggcctccaggatataggcatagctggccccagatttcttaatggtggtgcccagttccgcataacaaagggccccaaagacggagaagaggcccccgacagcccagatgaccagagagagaccaaaggaggcactgtatatgagcacacccttgggggaaacaaagatgcccgagccgatcatgttccccacaatcaggcacacgccgttaagcagtgagatctccttcttcagcttcacctgctccggccctgggctggccccatcacccaaaggggaggtttccacctcaggctgggaggccacttcatactcagtgctgtcaaccatggtggaggagaggaaacccttcaccagcttcctggcattgccctttaaggaagaaagatgatgctatagattaggtggttggcaattacatagaacctctacccgcctccaacacagggtaatacgggcagctcaccaaccaatgcggagacctccaaataaccttttctccagctcactcatcaaaacaaccccaacttgaatatttgtctatctatctatgtatttatttatttattgacagagtctcgctctgtagcccaggctggagtgcagtggtgcaatctcggctcggctcactgcaacctcagcctcccgggttcaagcgcttctcttgcctcagcctcccaagtagctgggattacaggcacctgccaccacgcgtggctaattttttttttttttttttgagatggagttttgctcttgttgcccaggctggagtgcaatggcgcgatctcagctcactgcaacctccgcctcccgggttcaagtgattctcctgcctcagcctcccaagtagctgggattataggcatgcaccaccacacccagctaattttgtatttttagtagagatggggtttctccatgttggtcaggatggtctcaaactcccgacctcaggttatccgcccgcctcggcctcccaaagtgctgggattacaggcgtgagccaccttgcccagcctccaacttgaatttttaagagaaggcactcattcgccagagagaaaggatctgtctctcatcattaggacattgctgcccacccgactcaccaaatagagaactaaatcttgggccgggcgctgtggctcacatctgtaaacccagcactttgggaggccaaggcgggcagatcacctaaagtcgggagttcgagaccagcctgaccaacatttagaaacccagtctctactaaaaatacaaaaattagccatgcgtggtggcacatgcctgtaatcccagctgcttgggaggctgaggcaggagaatcacttgagcccgggaggcagaggttgcggtaagctaagactgggccattgcactccagcctgggcaacaagagcaaaactctgtctcaaaaaaaaaacaaaatcaaaaacaaaacactaaatgttggttctctctgagcctgctataatacaagacaggcatgggggcagtgtggcggctcccagaaaataactataatggcttgaccccgagttttcagccttatccaaaacccgtcttccctccaatttcagcttcagggatcacctgtgctgaggtacaacattaggaactgaccctaccagcagctaatctgtgggagcgtctcatgacactgctcttttccccaaggactctacgtctgccaaaactaaaggcttcagaaacctgctggaaacccacaaccatcctcctgcccaaagagcatcccttaacccttagctggagtcttcagccctggcaaagcccaagtagacccacttcaccctgaaagaagacaggctattatcttttccttgcttttcctttcccattctctggtattctaagcctcctgctatcgatccctcacatcagcatcgttgaatcacccaaaaaagtatgaatgagagaagggcgatccaatgtaccataaaacctagggatgattggaggcagctgatggccactccctaccccagagttgctgctggagagatatcaccccgagccaaggcagggagacagctgcagccaggcagcacatgctggaaaacaccgaacaggagacagctgagaggaaaatgggagaggctagtcaagcaatggagagatgttagggtgagaggcactcgggagaagaagcgattagacactgcacagcagcaaagaggagggttagcaaggtaagtggagatgagaagagggtggaacgcacactcactccttggtcctggatataagcaggttctcacggcagtgtgagcagcagtcagggagagaagtgccttccaggatctgtggtctgatgctcctccttcccagccagcagtaaaagggaaggccagacaaatgcctatggatttaagcaagaagggtggaggaggtgaggcagcccgcaaaggaaggagtgagggagggggaaaggagtattaagcaaccatctgggtccaaggttcactggcccttcacatctgcaaaaggggcagctaggagctcttggctcagcactttctgtgataagaaggtgctctctcaggaatctcctttgtcagctctgctctgggaccaggggcccagaagaaaggacagtcagctgagtgcagtatctgtagccctggggaagctgtcccagagcaagttagctgaggacaggacagtagcggggaaggaatacacagcactctctctctctgtgtcctccatgccccaccctagcctctcttctctctcaccccaagcatttaagaaagggaggaaggttgcacagtgtgacacaaaggcttgttcccatgctgagattacaggaagtgtaagagcagtctctacaccatgtgactgggtgttctaagagaactctgcacacttccccatgcaaagagagactggggggttgcctccaagcctgggccactgccccaaagtctgagcctcagactacttcaaaagaaacacagtcaagagatcaaatatctgactgcatccccaccagacccacgtgccttttcattcttgacaaaacataccaagatctctgggataagcataaattcctataaacgccttcctcaaatataagttgactccactttcctaaaaaatatgaggaaatcaggccagacgcggtggctcacgcctgtaatcccagcactttgggaggctgaggcaggcggatcacaaggtcaggagatcaagaccatcctggctaacacggtgaaaccccgtctctactaaaaacacaaaaaaataaaaattagccgggcgtggtggcgggcacctgtagtcccagctattcgggaggctgaggcaggagaatgaggagaatggcatgaacccgggaggcggagcttgcagtgaacccacattaggccactgcactccagcctgggcaacacagcaagactccatctcaaaaaaaaaaaattaaaaaagaatatgaggaaatcagatttcactgaattctgttggacagacaggcccagaacaggcagaggaagctgagcactttttggaaatcacatagtttatgctatctttattatttactttaaatctggtattctgagtctcttttaccaacagaaatagaccctatccattctgaaatccaactgtctgtttcttctcctatctgttctaaccctctttggttattctacaaccagagaatagagatctaaatatctctgggagacatctctaccatacatcctcccattctagctctttaaacttttaatttaatctaggaggaggattctggtgtgagcgttcccagagatcatgcttctcccaagacaggctcacaatgatctgaaatccttctggaggagactctccttttctccaaaatgctcctgtaataataattgctatcacttattgagcacttactgggccagacacactgctaaggacttaagcacattatctcatggaacctccagagctcatatactcttaatcacacaagtatactatctctccatctccccatccccctggcctgccttagtctctaggccttccttttatttttttttttttttatttattttctttttttgagacagagtctcactctgtcccccaggctggagtgcagtggcacgatcttgactcactgcaacctccaccacctcctggttcaagcaattctcatgcatcagcctcctgagtaactaggattacacctggctaatttttgtgtttttatttcggtatttttattttattttattttattttattttatttattttgagacagacacttactctgtcgcccaggctggagtgcagtggtgcaatctcggctcactgcaacctccacctactgggttcaagcaattctcctgcctcagcctcccgagtagctgggattacaggtgcacaccaccacgcccagctaatcttttttgtttttagtagagtcggggtttcaccacattgaccaggatggtcttaaactcctaaactcaggcaatccgcccacctcggcctcccaaagtgctaggattacaggcatgagccattgtgcccagcctaatttttgtatttctagtagagacgaggttttgccatgttggccaggccggtcttgaactcctggcctcaactgatccacctgcttctgcctcccaaagtgatgggattacaggcgtgagccaccgatgccaccttagaccttgcttttggacaggaattatctacatgaattacctgggggaagatgtaagcagactagattaaaaagaaagaaagcctctgtcatccttcagtctatagcctagacgaaaggctccaacaaagtttgttaatctccttcctggctgcccctcccctttctcattctttgcagggataagaggtgattacaagtcctcttggcagtgctgctattgctagggtgcccacttctaaagcaaacaaaaaaaaaaacacaaacacatcatcacgcctgcccttttaagaccaaattcactggcaccaaggggtgggcatgtgtcctaatatgacgtaaaagaaaggaaggaaggagggacaaaggaagggaaaactgtgagggggaatggagagagaagtgtacagggtttcattcctgactggtagcatctgaaaagtgaagtcctatccgtggaattttgagacagaaatctgctgggggtaaaacccacactccagcaaacagcacgccctagtggtagcaccaggaagtgctagtggactctaacctacttcagtctgcccgtgcgcactaggcaagggaggctgccatgcattgagaacatgaagaccccctcttttctcaaccactacctagcaccctggacaagaaggcaccatctttggcagctcacatttctccctgagaccctgggtcttagggtaatgcttccaccattcaggcagccccaccattcaggcagcctgggaccagcaacacccctaggctctcccaaaggggctcttctaccccaggtttttggtttttttttttttttggtttttgggttttttttacccgagatggagttttgctttgtcccccaggctggagtgcagtggcacaatctctgctcactgcaacctctgcctcccgggttctcctgcctcagcctcccaagtagctgggattacaggtgcccgccaccgcgcccagctaatttttgtatttttagtagagatggggtttcaccatgttgtccaggctggtctcgaactcctgacctcgtgatcctcccacctcagcctcccaaagtgctgggattaaaggtgtgagccaccgtgcctgacccaccccaggttttacatgagaaaccccataagataacagcagcccttgttgcctttccctgtctgagatgcattcatctctgaacacccagtgaagattacaggacaacacactcatcctacagcttgtggaagaaatttgattcagaaactggcagcagggcctccagtatgcagtgctgggcaggacagccaatggagcccctcaccctaacctcaccctcgaatgacaacaccaaaacacaatttctccaggaactagtacataattcggggtcttggctcctcagccaagctcagggaactactataagaacacactttctctcccagagaccccatgtcctgccttcctggctccaatcagtctgtgctgcctcccctaacaacagaaacagaaaacagatacactctggtatgactagatttccccatcactccaagctagaagctcagctcctccctccccagttctctgtttgtttttctatattccactgtggctaagacagtctctttaaaaaaaaaaaaaaaaagtgaaacaaaaaagaaattgtttactcctgtggccagggcttccattaaggaagggctgaagtctctgggcagaaggttcagcccagggagggacagggctgggatcaagaaacaggaggctcttgggtctccattcagccaatttttaggactccatcctcctcctgcacttcccctctcgcccattgtccctcctctcccacctcttacctgtccagtgacctttgggcaggtgcggggaggaggggctaccagctgagtcaggggagaggggaaggtgctagttaggagaaccaagcgtatcgctcatgctgcaacagctgttgactctgaggagcagaaaaagcagagggtaacggggact

SEQ ID NO: 105 - DNA, 42213 bp, Homo sapiens
  source 1..42213: mol_type = genomic DNA
ttaggaacataaacttttattgtcatccagcacctgtgatagtttcatgtctctctaaaggagacaggaaattggagcattgtgggcccttttaaaagaaaagaggagtaggtaggcacacccaggtgcttctaaaacaaccaagcccaaacctgacatgctcctccccacagtcaccttcattgtcccctttaaaagtctggaacagtatgtagcaaaacaaataaattacttttcatttcaaaaagtaagttcaaaggttgaagctgcctaggccaggcttctggacaggtgcctccaaagaagtgagctttccttttcaacttccttagctctagccagtagaccagaaacccctgctttccacatcaggattccagatggtgtttagttagatttgggatcccgttgcttgggcatctctcctccatcttccaaatccatttctgcagcaactgacatacacaggacctggaggtaccttgtggcagaccctacaaagagaactttgagttggaattgagaagaggtcagctgggctgagttcaagtgtcactgaatggaactcagtgtgaggggagtgattccactaagccgaagggttcataagaaggggctaaggcaaagatgtctttggaggctggatttacagaaaaaggcaaaaaccaagctctgcaatagctgagcggacttaaggatgcacggcttacccacgatccttcggaggtaaagcggtcgcttatgttctggcactctgatgatgaggaagtaaaagggcaggcctgagagggcaatggcaatgccgatgagggagttgatagtatcactgtaaagtggaacagccaccaggaagatggtgcagaggcagaagacaatcgggaagaaaacgctgagctaagggcacaggaaacataactggagtggacaactcaggattcttaacagctaaaataaccccacctcccataaggattagcgcactgagccttctttccatacctttaatttcaacacattactaacgaccaagtcccaggcaaaggtttctaaataaagtgctttgtcatagtcccttgtagcaacaactccagctgtttcaggtggagcagaggtaggatggagttgccttaccttgaggggacgaggtcgatcaggctccttccagcgcagataaagctgacccacaatagaaagccccacaaagaaccagtagctgaagctgtagtagttaatgagctggaagatgtcttccacgcacaagtagatcaatgccatgataccctgtaagcgtgagcctaagtcagctcttctcagggcctttgttaatccaaaggcttttcactccctttataccccagaaatccatcccctgtcaatcctcaaagtctcctggtcctcttctggttttaatccctttaacaccctagtttcagtaccttatcccctctcttataagtcagtagtctcaactggcttttcaacccattcttcaagttaaccctgtataaagcaagctcgaaacaatccctcaaaagtcttgcataggaccctttccataatggctccaacctacaataacccgctcttatctcctcctacatgttgagtatccctgttctgaaaatccaaaatgctccaatgagcatttcctttgagtgtcaagtcagcactcaaaaagtttcagatttttagagcatttcagattttggatattcagattagggatactcaacctgtattaaaacccatactgctttatcacaggattttctgatgctatttctcctacctaaagcccatctctaccatttgcaaccctagccatcaagatgcactttttttttctgagaacactttggtggattttaagacacacacacacacttctagatgtaattcttcaccctctactcccatggaagtgatcgtttcttctcttaaacaccgtatcactcactatctgtcatggcaatcaatcattacagtgtattccatgtactttttgccttatcttagagcagaggtgtaccattccttagagcatttggatttcccctgtagcggttagcatagtgccttgcccgtggtgaacattctgatccaccaatagtttttctattggaatctttcagagctttcaggaagctagaacagtcgcttctgctgttactaaagtttcccccgcaatctggctttcagtctcatccttgagttcacttacattgaagagcagagaaggcactggtgtgaaccgctcaacatggatcatgcagatggcatcagggagatggccttctcttgagcccacaaagaaaagcctatgttaggtaagataggagaagctgagaaaattggtggacacggtgcagcctggttcacctgccacatggccctccctctctgccatcccttccttcaaaagtatttggataatatggactggagctcagtattaagattaatgacaactgcaggcttctgctagaaacaagaagaaagaggttgtggtatcggttggagaacacaagtaatcaaaggctgggtcctgtaagttctgtccactgcatagccctttgatgatacacccctcacaaaagttgccactcttacctagaagcagccacaatggaggcattgaggccaccaaaacaggataatgcaactgacagtggaattatccagttaaatattccaaatatctgatctgcaaaagtctaagggaaaagaatggaagagtcattagcaggatctaaaagggatgaaagacatggatgggcatgcccccagattccccttattaggtattccaacctttcttccacagtggggttaacaggaccttcttgcaagcccggtattctaaatgaactcctttcaaggctgtctaccccctttccaggactttcaagagccagaatatacccagtaccccacaagacaccctcaaccttctgctagtgaaaatcctttaccacagcaacagcatcactggccaagatgtctctcatgtctagcacagtataataggccacattggtcaagatatagatgatggtgacaatgggcatggagatgccaatggagaggggcaggttcctacagccaaatagaataaaatgcacattagtcccacagtcatatccctatctctcctttaatccttagactctccctgccacaccggtctttccagggatggagactgttgctacatttcctcaatgcatttgtctttgacggtgccctggatagtggctgaagctctgaacacttaagaactaaagaacattaggggaaaggaatatcatattaggagacaggactgtgcagctgggagcagtggctcatgcctgtagtactaacactttgggaggctgaggcagggagatggctcgagtctaggagttggagaccagcctgggcaacatggcaaaaccctgtctctacaaaaaactagccaagcagctgggcgtggtggctcacgcctgtaatcccagcactttgggaggccgagccgggtggatcacctgaggtcaggagttcaagaccagcctggccaacatggcaaaaccctgttcctactaaaaatataaataattagccaggcatggtggcatgcacctgtagtcccagctactcaggaggctgaggtacgagaatcacttgaactcgagaggcggaggttgtggtaagccaaaattgtgccactgcactccagcatgggcgacagagcgagactctgtctccaaaaacaaaccaaaaaaaaaaaaattagccaagcgtggtggtgcatgcctgtaatcccagctatttgggaggctgaggtgggaggatcacttgagcctggggaggtcaaggctgcagtgaaccatgactgggccactgcactccagcctgggcaaggcagccagaccctgtctaaaaaaaaaaaaaaaaaaaaaaaagcagggcgggggggattaacaaagactgtccccagcatcataacgcacaggaaaatgggaggttgttttgttttataccccaaagatcttttggtgtcaggattccatctctaagattatcaacattggcaattttgcctcaaggttgagaaatataaaaagaaattatggaggcaaattgtgaaatttaacatcttcagagaataagataggccttcagtaggaagagaagtgtatgtatctgactagcagcctggaagatatgtctgcccaccccttcctcagtttgagaacctcaggagccatcctaactggtgggcaaaagaaagatgcaaagagctctcaaggtccctgtagcccaataaagccatgatctttataagcatccttaacagtaaggctgccaaaaaaaaagcacaaagtggggcaaatactctgcaaatagagtcatgcagtttctgtccggtaggtggaagtaccacccaggccttgatcctgcttctgttatctctgttcccatagcgttaccactagttgtgtaccaagagtgctcttctgtttctcaagccaaaaggagtttattggtataagaattgtgattcttttcacttaagcatttacagaaagctgggcacagtggctcatgcctgtaatcccagcactttgggaggctaaggcgggcggatcacctgaggtcaggagttcgagaccagcctggccaacatggtgaaacccatgtctctactaaaaatacaaaaattagccaggcgtggtggcaggcacctgtaattctagctatttgggaggctgaagcaggagaatcacttgaacctgggaggcagaggttgcaatgagccaagatcacgccattgcactccagcctgggaaatacagcaagactctctccaaaaaacaaaaaacattttaccgaaactccactccctggcaaatcttagttcccagaatcatagaattttagagccaggaaaggccatggagatcacagaatttaaccccctcaattacagataaggaaacaggcaaagagatggccgggcaactccctcaaggttagccaacaagtcagtggaaagatcaactctaggtccttgacttcctgtccagttctcttttcactctatatatagactacagagcaataatggtagggtgacttaattgaatgactgaaactataccacaatgtcagtatgaatttaggaaacaaggaaggtatcagagggaaacacaggaaggtttctggaagtctatatcccaaagctatgtatgtggggataagggtggataaaatatctatcaaggaaaatctgttttaaaaacatacataagcatataatacaacctgctttaattaatgcagaaattaatgaacaaatgtaaaaatgcctttaaaaatttacaaagcatacatgagtaagttcatattttagccctgttactgtgatcatagacaagttacttctctgagcctcaggcctcccatctattaaaatgaggctggtaaaattaacctcatagtggttgtggtatgctgtctggcacgtagtaggagctcattaaatgatggctatcactgctatggaaagttggtggtgcagtacctacctctcaggattcttgatctcttcagtgacatagttgagggtgtcccagcctgagtaggagaacagagctgagtacagtgccagggcaatgtcacccactgcaaatgatgaaccctcaaaggaattctcaaaatgagtagaggctcctggaacccaagaacattggaaggcaggggattagtggctcattctcccacttcaagatggtcaagtaaaggactgacagaatatggtaatataatagcaggtaagtggcctacaacacctttggcagcaagagtaccagtaagggaacaggaaacagaagagagacgtctatagagatagaccagaatgccctgcatcctaatgacatagatggggatcttgacaggaagggtccagggtagctttctaggataagaaaccaccatagagcagaaaagctggagaatagaaacaatgcagttctgttctgctctgcaggctgcctgattcctgcctcctatcacaatctgccaaaggcagctcccagggcatggctgtcaaccctttgccaagatcagcctcctctgggaggcagcgtgcatggaagttaaaggacagacttttgggtcagttgtcctggatacaaatttcaactcctctacttaccggtagcaacttgggcaagatatttaattcttttttttttttgggggggggacagagtctcgctctgtcgcccaggctggagtgcagtggcgtgatctcagctcactgcaaccaccgcctcctggattcaagcgattctcctgcctcagcctcccgagtagctgggattacaggcgcctgccaccatgcccggctaatttttgtatttttagtcgagatggggtttcaccatcttggccaggctgatcttgaactcctgacctcatggatccacccgcgatggcctcccaaagtgctgggattacaagcacgagccactgcgcccggcccaaggtacttaattctgcaggctgtttcctcatccataaaatgagaataataatagtgcccaccgaataaggttatagtaagaaatgagataatgcacaaagagcacttagaggagtgcggctcacagaaaatgcttaaaaaagattagttgctactaatattatttcttaccctggccaagtctaacaatgcctgcaacgatgaccgcgatcagtgccaatactttagcataggtgaaaatatcttgtaccagggttccccatttgacataggcacagttaatgaaggttaagagacctgaaagaaaaataatactgattggtgacttacccttaccaccctagggccttagactcccaagcaatttttccagtaccagtcaccaagatatatatacccttcagccaaagacagaccctctgacctgctctgcactggaaccctcggggccccagaatgtcctcaccattatcatacaaaggcctctatactccccacccccagcaccttatatgggagacacaaaacaaagtgactgcagatctgcttacataaaaaatacatccaaatgtccaatcacagcagtgggaggcaactgggaactgtacaggattagtgattgttccggctcttggctctgaaaagtcatggtctctccctcctacctcccattccccatgggctccaggacacagcactctgactctgtggtattactgttaaccttgaggagttctgctgtgacttatccaatgctgagccagcaggtcaggctgtgtggccaaggattaggatgaaggccagacttcctgcccactgcctggcagctcagctgcctgcttttgtgcttggaaagattcttgcagctaagagtggttcctgtagaatggggacagggcatttttcctgatgggacaatagagaagtaagagccacacacattcccccagtccttctactcagaagtacaggttttaaaagtaccttttatcagggttcttaactagggcctccatgaggctcgaaattctctttcaaagtgttatgtccatatgaatacagacatacctaagaaaaagtttcatatcttttcttagaaagggatcatagcttttatcagaatctcaagtccattatccctcccccaacaaaaaagttacaatctacgacttgaatttgaattacttgaagaagttcaacaagggaggctcacgcatgctgtgaggttgaccagtagccccagaatgtggccgagaagaaagttggaaaaaaaaatacagatcttcccactggtagcatagcgaatcgcttcattgctccctccttcccagctcagcaactggaacactataaggagggcttaactttaaagcccttctcccaagggctccaagggcaaggtcaacatcaccctgccttaccagtcaagagaatgaggcctagtacagttcttgcctacttcaggccaccaacacagtcagaaacaccctctgagttctcctggcagtggtgtggccttggtgtcgctagtcctcctattttgtggtgtcctggcctcaccacattctggctacttcatcctgagaagcagggaagtctggcctctcagaacagctgccccatcttctctctctcaccctcccttccaccaccaccctcattctactgactgcccaagttcctttctgctcttcctgagaaggcacattcctgtcctatataaatgcttgcctttctgcctaataaacaacaaaccttatcacagggctgggcaaaaatgtacccacagctccaggccaccccagtgctaagttaataatttaagacacaagtgtgcagcaccccacaaaatgaccaaagtggctgtatcttgccctccacaaatctttcaaatctgtcactcctcctcagccagtcacccatcctttactccccactggactccagcctccagccactcaacagcttagtgccccttctccccagcttgtaacctctgcccttatcctaggctctgcggctggctcataaccacaacatagccaggtttccaagtagaaacaccagacacaaaggatgctgccacattgtcaggaaaatgggatccccaaatacaaatttatgattccctgcagggtaaccatgagtcataacaccaaactggaataagcttacaggactagctctagttcagactcagagtctgagctgtgtgccacaaggttcttctcagttctgtccagggatgtaggcagggaaaaggagggataagcaaccaattcaccacctgctaccacagcagattctgaaatggaaatacatggcttgtttatattttattttatttatttttctttttctttttgagacagagtttcacccttgttgcccaggctggagtgcaatggcgtggtctcggctcatggcaacatctgcctcccgggttcaagccattctcctgcctcaacctcccaagtagctgggattacaggtgtgcgccactatgcccagctaatttttatatttttagtagagatgaggtttcaccatgttggccaggcttgtcgcaaactcctgacctgaggtgatccacccacctcagcctcccaaagtgctgggattacaagcatgagccaccgcgcccggcctatattttattatttttttttatttacttatttattgacttatttatttatttatttatttattttatttattttttgagacacagtcttgctctgtcacccaggctgaagtgcaatggcatgatcttggctcactgcaacccccacttcccaggttcaagcaattctcctgcctcagcctcccgagtagctgggactacaggtgtgtgccaccatgcctggctaatttttgtatttttagtagagatggggtttcaccatactggccaggctaatctcgaactcctgagctcaggtgatccgcccacctcggcctcccaaaatgctgagattacaggcgtgagccaccacacccgtccctttttgttttttttttggagatggggatctcactctttcacccaagccagagtacagtggagaaatcatagctcactgcagcatcgaactcctgagctcaagggatcctcccagctcagccaccctagtagctgggatcaaaggtgtgcaccaccatgcccagctaatttgttttaattttttttttttttgagatggagtcttgctgtcacccagcctggagtgcagtggtgcgatctcagctcactgcaacctctgcctccagggttcaagcagttctcctgcctcagcctcttgagtagctaggactacaagtgcccaccaccacacctggctaatttttgtatttttagtagagacagggtttcaccatgttggtcaggctggtctcgaactcctgaccttgtgatctgccctcctcagcctcccaaagtgctgggattacaggtgtgagccaccgtgcctggctgttttaatttttttagagacggggtcttgctatgtggcccaggctggtctcgaactcctggcctcaggcaatccttccacctcagctatctgaggagtaactgggattatagggaagagccatggcacctgggtggcttgtttacattttaatccctattgcttctctacttctttttttttttttttcgagacagtcttgctccgtcccccaggctggagtacagtggtgcgatctcagctcactgcaacctccgcctcctgggttcaagcggttctcctgcctcagcctcccgagtagctagaattacagacattcaacaccatgcccagctaatttttgtatttttagtagagacagggtttcgccatgttagccagactagtctcaaactcctgacctcaggtgatccgcctgcctcagcctcccaaagtgctgggattacaggtgtgagtcaccggcgtggcgtgcccagtctcttctctacttctctatccatccatttgtatccctctctttgtccaccagtatcccacctcccccactcctgagcctgatttctctgacccaccttctagccctgatctgctctctgtactgagcacagaaggctcagtttgaatgaggaagggaatcctacagaaagaaaccagggagcagagggaactgcctgaagagagctagccctcctcttcctcaaagcctagcttcctccagggcctcttgactgtgggagcaggaaatgggtatggcaggcagcagtgctgacagggctttttgtccccacctcagcggatacagctgaccactggccccagagcccagctaagtgcactgctcttgaagtggagcccaacctcctgcttcagggccaaggacaggaggggaccatggggttaggataatatggaggcaactgcaagttaacctcaagggcagagatgccctccccttctacctctaggggcaattcaatccccacccaacactgggccaagtctataagaggataacctgaaatcacctttgacccttgactcggtgcagcagcactcctgctttgaccccagggggagaaaaaaagaatctgcaaagaagtcactcgtggccgggtgcagtggctcacgcctgtaatcccagcactttgggaggccgaggtggacagatcacgaggtcaagagatcgagaccatcctggccaacatggtgaaaccctgtctctactaaaaatacaaaaattagctgggcatggtggtgtgtgcctgtagtcccatctacttgggaggctgaggcaggagaatcacttgaacccaggaggcggaggatgcagtgagccaagatcacaccactgcactccagcctggtgacagagcaagactccatctcaaaaaaaaaaaagagaagtcactcctataaccatctaaaaagatgttcctgaatggatcatcaaacccagcctacatacggtccccgggagtaggagactagttctagtggtaaggcccagcatcagcgctagaactaaaagccagaaagcaccagaccaggtggatccagaacagaacaaagcttgcaggcccactctggatcagatgctcaggtttagtttagacacctaaatgaaacatttcctgaaaaagaacattaaacccacaattctgtaagcactattacctttaaatacacacaatgtaacacacaaaacttatgattacaggcgtgaaccaccatgcccggcgtcattccattttaaaagtgatctatagagccaggcgcggtggttcgcgcctgtaatcccagcaccttgagagactgaggcgggcagatcacttgaggccaggagtttgagaccagtctggccaccatggcgaaaccccgtctctactaaaaatataaatattagctgagtgtggtggcgcatgcctgtaatcccagctacttggaggcagaggtaggagaatcatttgaacccgggaggcagaaattgcagtgagccaagatcacgccactgcactccagcctgggtgacacagtgagactccatctcaaaaaataaaataaaataaagtgatctatagctcttccttttactaagccaacagcgtcttcctcccagcttctaccagtagtgccagacccctcctctgtctccacacagaatgaagctaaatcctcttccacccaatggcccttcttaacattaaagatgaatatcacggccaggcgctggctcacgcctgtaatcccagcactttgggaggccaaggcgggcagatcatctgaggttgggagttcgagaccagcctgaccaacatggagaaactccgtctctactaaaaatacaaaaattggccaggcgtggtggcacatgcctgtaatcccagctagtcgggaagctgaggcagaagaatcacttgaactcgggaggtggaggttgcggtgaactgagatctcgccattgcaccagcctaggcaacaaaagcaaaactccatctcaaaaaaaaaaaaaaaagccaggcgcggtggctcacgctgtaatcccagcactttgggaagctgaggcaggcggatcatgaggtcaggagatcaagaccatcctggctaacacggtgaaaccccatctctactaaaaatacaaaaaattagccgggtgtggtggcaggcgcctatagtcccagacactcaggaggctgaggcaggagaatgacgtgaacccgggaggcggagcttgcagtgaaccgagattgcgccactgcactccagcctgggccacagagcgagactctgtctcaaaaaaaaaaaaaaaaaagccaggtgcagtggctcacgcctgtaatctcagcactttgaaaggccaaggcgggtggatcacgaggtcaggaaattgagaccagcctgcccaacatggtgaaaacctgtctctactaaaatacaaaaattagccaggcatggtggcacaagcctgtagtcccagctactcgggaggctgaggcaggggaattgcttgaacccgggaggcagaggttgcagtgggccgagatcacggcactgcactccagcctggccacagagcaagactccatctaaaaacaaacaaaaaggatgaacatcctgtccccttgagtctttactccttcaggctaaaacccagattttacaaccccttgtggagcaaatgtggcttccagacccctcaccatcccaggactgtcatttatttcactttgtcatttactgcatatacttcactgtgtcagtatttccccagaaatgcaagaccccacacagaaaactccagaccgtgttgccgactacggagtctcaacctgaaatcattgtttactacaactcctttctttcccacctcaaagtgatgagatctttcctcccctctttctggacctataaaaatgatttttttagctgggtgcgatggctcatgcctataatcccagcattttgggaggccgaggttggaggatcgcttgagtccaggagttcaagaccagcctgggcaacattgtgagaacacatctccacaaaacattttttttagttagccagacatggtggcacacacctgtggtcccagctacttgggaggttgaggcagggggatcgcttgagcccaagtggtcaaggctgcagggagctgtgatcgcaccactgcactgcagcctgggcaacacagtaagatcctttctccaaaacaaaaaaagtgattttttccccccagatacaggacttcatatttagtcttagtgactttcctctgagtttttatgcattattcttatatgatatgggatttttccttcttcattttattagttcaaatcccttctttaattttgtgaaatctgcaaatttgatcagcatacctcctgagtcttcactgaagtcaccctaaaaatgttgactagggccgggcgcagtggctcacgcctgtaataccagtactttgggagaccgaggagggaggatcacctgaggtcaggagtttgagaccaggttggccaacatagtgaaaccccgtctctactaaaagaacaaaaattatccgggtgtggtggtgggcacctgtagtcccagctactcgggaggctgaggcaggagaatcgcttgaacccaggaggcggaggttgcagtgagccaagattacaccactacactccagcctgggcgacagagtgagactccgtctcaaaataaataaataaataaataaatgttgacatgggctggcagcagtggctcacgcctgtaatcccaacactttgggaggctgaggcaggcagatcacttgaggccaggagttcgagaccagcctggcaatatggcaaaaccccatctctactaaaaggaaaatgcaaaaattagcagggtgtgatggcacacgcctgtggtcccagctactcaggaggctgagacatgggaattgtttgagcctaggaggcagaggttgcactgagccaagattgtgccactgcactccagcctaggtgacagagcaacactctgtctcaaaaaaaatttttttaataaaaaaattaaaatgttaggccgggcacggtggctcacgcctgtaatcccagcactttgggaggccgaggcaggcagatcacaaggtcaggagatcgagaccatcctggctaacacaatgaaaccccatctctactaaaaatacaaaaagttagccgggcgtggtggcgggtgcctgtagtcccagctactcgggaggctgaggcaggagaatggcgtgaacccgggaggcggcggttgcagtgagccgagatcgcgccaccgcactccagcctgggtgacagagcgagagttcgtctcaaaaaaaaaaaaattaaaatgttgactaagatcaacagagctgtatagtctatcactgtagacctttctgtatttgtcattattccacaatgttattcagccaactaagaatctaccaaactttatttttatctagtctaccttgtcaacaagaatatcatgagaatttgccacgaacctctccgaaatctgcatacacatgcctctgctctaacaatctaatgatgctatcaaacaattcaaatcaaattagtatatatttatgtagaatattcatagttacacccttgcagtagtcaaaaactagaaacaacccaaatgcccagcaacagtagattgaataaatactaaacagcactaagaataaacaatctgtaatcctagcacgttgggaggccaaggcgggcagatcacaaagtcaggagtttgagatcagcctggccaacatggtgaaacccccgtctctactaaaaatacaaaaattagctgggcgtggtggcgggcacctgtcatcccagctactcaggaggctgaggcaggagaatcgcttgaacccgggaggtggaggttgcagtgagccaagatcctaccactgcactccagcccgggcgacagagtgagactctgtctgggaaaaaaaaaaaaaaaaagtgaacaatctacgactacagacaaaaatacagaagaatctcaaacataataagcaagccagatgcaaaagtgtacatatagattatatccatttacataaaatcagagaaaactaatcaatgctactagaagtcagaatagtgatttccctttgtgtggggtggagaggcagggactgggaagagcataagaagggctcaagggtgctagttacacatgtgctcaactagtgacaattcattaagccataaacttatgagattgcactgttccttctgtatattatatttgaataaaaaaattaaaattgaaccaaaaagtgaggttagcagagtatggcttgttcttagtgaattcatacacgttactaatgatttcccacccttctgctcgtacttcactaaccagatttaacttacaagcctagaatttgggcaagaatccaccttaagttatcacttcagagtgctgctcatccacctccggtggaaagctgggctatcacttgtggtaggtagactaatggccccccaaagatgtccaccccctaatccctggaacctgtgagccatgttatattgcatggcaagggagaattaaagttgcagatagaggccaggcgcagtggctcatgcctgtaatcccagcactttaggaggccaaggcgggcagatcacctgaggtcaggaattctaaccaacatgagtcagcctaaccaacacggtgaaaccccgtctctactaaaaatacaaaaaatagctgggtgtggtggtgggtgcctataatcccagctactcaggaggctgaggcaggagaattgcttgaacccaggaggcggaggttgcagtgagccaagatcacaccactgcacttcagcctgggcaacagagcaagactctggctcaaaaaaaaaaaaaaaaaagaaaaaagttgcagacagaatgaagattgctaatcaagtgacaaaacagggaaatcattctgtattctctgggtgggcccaatgtaatcacaaaagttcttaaagatgaaagagggaggcagaaaggtcaatgtcagagtagtacaatatgagaaagactctcccagttactgctgactttgaaaatggaagggtccatgagactctagaagctgggaaaggcaagaagatggatcctctccttaagcctccagaaagaaacacagtgctacttcatattagcccagtgagacccatttcagacttctgacctccagaattatgagatgataaatttgtgttgttttcagccactcaattggtggtaacttgttagagaagcaatagaaaactcatatgttggctgggcacagtggctcgctcctgtaattccagcactttgggaggccagggtgggctgatcccttgagctcaggagtttgaaaccagcctgggcaacatagagaaaccctgattctacaaaaaatacaaaaattagctgggcctggtggcgtgcacctgtagtctcaactactcaggaggctaaggtgggagaattgcttgagcctggggaggtcaaggctgcagtgatccttgattgcaccactgcattccagcctgggtgacagagcaagactgtctcaaaaaaaaaaaaaaaaaaaaaaaaaaaacctaactgcaggcagaaaactggaagtagcactgggtggtactattcattacatttgttgaaaaatggagaaaggggaagtgaaacccttgacagctcactggatcttggtgtactgaaatttccctctcactgcaatcaaaagaatctaaatgtgaccttatgcaaagaaggcaggcatcccttatgatagcagatcctcaaacaagtatgtacctctctctttaatgtactacatgaatcccagctcttctagcaaatcatcatttttgaacaaagtatactctttcattatcatattctaatcaaatatcgctgatgcctatgaaattgtttcctcctttcagtaaaaggtcaaatacgggccgggcacagtggctcatgcctgtaatcccagcactttgggaggcggaggcagacgaatcacgagttcaagagattgagaccatcctggccaacatggtgaaaccccgtctctactaaaaatacaaaaattagctgggtgtggtggtgtgcgcctgtagtcccagctactggggaggctgaggcaggagaatcacttgagcccaggaggcggaggttgcagtgagctaagatcgcgccactgcactccagcctggtgacagagcgagactccgtctcacaaaaaaaaaaaaaaaaggtcaaatacgtttattagccttacttgtaatatttgtagataagagttcaaaagcatcatttctgatcttccatcccattttctccaaatgcgttactgagcaactcctctctgcctttattctctgctatgtagtctccaaaatacccagatttatacttttatctaggcatttttctccttgcctctaaaatttccattctaaagccttattatacacatctctcccaatccctataaacctcctctatcccttaccaggagtttatctttctggtatcttagaatcttagaatttacggttaggaactctgttctgtgttcttttttctttcacatacacagccttcagctgacaaagagacgaaaattccacctgccactcagtttgctactttaaacttcacgtcaccagtgagacatctcagctatcttctgactggtgacatcattcatcccacagcaattagcagaaggatagcagtccctaggcttaattggtgtgagcaagctcttggtcacatgttgctcagaaaaactgcacatttctaggttaggctgggtctgtgtatagtcagatgcacactattcctgggggaaggccaaaccccacaactggcatactcaggcctgctaataccctggtgtctccaaaatactctaccactgctgtttcctcagaaggtccagatataagctctctggaaacgcctcatatctgttacctaaacccagagatttcaagtctcttcttccttttctttgctgcatccccatttgttttgtctaatgttggtttgggaaaatctctacacctttttttttttttttttaattgagatggagtctcgctctgtcgcccaggctggagtgcagtggcgccatctcggctcactgcaagctccgcctcctgggttcacgccattctcctgcctcagcctcccgagtagctgggactacgggcgtccgccaccacgtccggctaatttttttgtactcttagtacagacggggtttcaccatgttagccaggatggtctcaatttcctgaccccgtgatccacccgccttggcctcccaaagtgctgggattacaggcttgagccaccgcgcccggcctggaaactctctacaccttgaaatcacaatttcaccctggcttctttgatacattatttcttccactctccctaggtgctgttatttctctcagatagcagatggccttcaaattattttacctttcagactacagaaaccttttactccaggtgcagtggctcatgcctataatcccagcactttggaaggccaagacgtgaggatcacttgaggccaggagttggagaccagcctgggcagcatagcaagaccctttctctacaaaaaaattacaaattagctggacttggtggtgcacactgatggtcctagctacttggaaggctgaggtgggaaggtcacttgagtgcaggattgagcccataaccatgctactgcacaccagcctgggcaacaaagcaagacttcgtctcagaaaataaaataacatttttgaccaggcgtggtggtggctcacacctgtaatcccagcattttgggaagccgaagtgggcggatcacctgaggtcaagcgttcatgaccagcctgaccaacatggcaaaaccccgtctctactaaaaatacaaaaattagccagccgtggtggcgcacgcctgtaatcctagctacctgggagtctgagagaggagaatcattttgaacccaggaggcggaggttgcagtgagccgagattgcaccactgcactccagcctggatgatagtgtgaggccccgtctcaaagaaagaaagagagagagagagagagagagagagagaaaggaaaagaaaagaaaaatatcttttttttttttttaaagacagagtctcgctctgtcgcccaggctggagtgcagtggtgcgatcttggctcactgcaacctccgcctcccgggttcatgccgttctcctgcctcagcctcccaagtagctgagactacaggcgcccgccaccaagcccagctaattttttgtattctttagtagagacagggtttcaccgtgttagccaggatggtctcgatctcctgacctcgtaatccgcccgcctcggcttcccaaagtgctgggattacaggcgtaaaccaccacgcccagccaattaaaataaaaattttaaagaaacaaccaattcgcttactcaggtgtcatgggtgagagcctctgtaattgcaaaattttgactgagacagtgaaagagatctaacttaactgactccatcttgcttctaacctccaagctgcctttattcattcccaggcataggctgaactaactttgggagaaacttagtttataatttagacaaagaggataacagccctttcccaaagcagacctccttcttgcctggggactagattgcctttgtaggactaacattagccacaagattagaaattatggtttagggctgggcacggtggctcatgcctgtaatcccagcactttgggagccataggagggcggatcacctgaggtcaggagttcaagaccagcctgggcaacatggtgaaaacctgtctctactaaaaataaaaaataaaattagctgggtgtggtggcgtgcacctgtaaccccagctactagggaggctgaggcaggagaattacttcaactcgggaggtggaggtggcagtgagccaatatcacaccactgcactccagcctgggtgacagagcaagactccatctcgaaaaaaaaaaagaaattatggtttaggagtcacgcagctggaagctacaagattctgaccttccctaaactgctcctaagatcagtgcttgaggtattttgtagaccctgctcttggtggatcagctggcccccacccagatcaataaactggcttagctgatcttgtggcccccacccaggaactgactgagagcaagaagacagctctgattccctgtgatttcatctctaactaatcagcactcctggctcactggcttcccctgacccaccaagttatccttaaaaactctgctcccagaatgttcggggagactgatttgagtaataataaaactccggtctcccgcacagccggctctgtgtgaattactcattattgcaatatccctgtcttgaagaattggctctgtctaggcagtgggcaaggtgaaccccttgggcagttacacctctggcaagaagacacaccaaatgcaatccctgtgggtcactggatcagagtcctcccgctctccttcctggaactcagtcagcactttggtccctgtggctctgaccactctgagggagcaagcaggcagtttgtaccaggagggtcttatagtaacaaccccgtgagtcccttctccaagccgtgtaaatccaatccttattggtttgcttagctaggggtcagttcaagtcctcaggtaccagatctcaagcctgagtgagcatcagtaccacctgaggaatttgtcgacccacaacttcagggccccacaccccagaggttctgatgcaggagacctgagacagtttcgcaggctaatctgaggatctgcttctctgggtgtgtttccttaggtaatcacctacggaaataaccacacacagagcagctgtatcagaacagtcgcaaccctttgctaactcaaggctcctctatcctggctgcaaactagcatcacttgacgagctttaacagtccagtgctcaggccccacccagaccaatgaagtcagaaattctggggtggaacccaggcatcggcatgtttttaaaactccccaggtgactctgaagcatggtgacaattgagaacggcttttcccacctctagtgacacaagaccctcatcaattctcctcaaaagcaatttttctgcttccttaattctcgttctccaagccaattctcatctcattcttctccccagtggttcagatttatgtagtcagggagtgggagtgatgagtattgttttctttctttcttttttttttttttttttttttgagacagcgtctcactctgttgcccatgctggaatgcagtggcacaatcttggctcactgcagcttggaccaaatgggcttaaacaatcctcccacctcagccacctgagtagctgggactacaggcatgcaccaccatgcccaattaattttttttttttttttttgtagagaccaagttctccagactggtctcctgagcttaagccatcctcctacctcagtctcccaaaatgctaggattacaggtgtgagccaccgtgcccaatctgagtattgcttgcttgctttctttctttctttctttctttctttctttctttctttctttctttctttctttcttttctattcttttcttttcttttcttttcttttcttttcttttttaattgagacagagtctcactctgtcgcccaggctggagtgcagtggtgcaatctcggctcactgcaagctccgcctcccgggttcacaccattctcctgcctcagcctcccgagtagctgggaccacaggcgcctgccaccacacccagctaattttttgtatttttagtagagacgggtttcaccatgttagccaggatggtctcaatctcctgaccttgtgatctgcccgcctcggcctcccaaagtgctgggattacaggcgtgagccaccgtgcccggccttgttttcttaattctccagatgattccaatccacagccagagttaggacccactgctgcccagcatcttccgcaacctcctctaggctacctgcccagcttcttctgaggcagagagaaaaagaaaggaacatagaaacatagaacatagaaaggaagagagcaaggatgagcccccaaagggacttgatgatcaaagcagcataaaggtctaccccttcactgctggtcaagagtttgttccaaagttcacaacaaacccacactagaacccaaggctctgatgaaagcctatttcttgaggtgaatatgggccagaaaaggtaagtttcttcacctccaccctcagatggctcttgggaaaagccctctgaaaaaggcaactagcttccaagtagaaggttcaaagggcaaaagtccgttggggggcccagcatctgactgttccacctcattagccacaagtacatgagatcagtcattctggtaccaggagaagctgcacgaggacacctggccaaagctctcagacacacagagatccaaagtccttcacagcccacagcggctctggcagactcagggtaagctgtctgcccccttcccacagcaaccctcagcccccaccagcaccctgaaaggcaaaagcacgaaatacccttctcagccaagttgaacctggaatcatatcttctgttcattcatccagccaacatttattgaagaacccactacatgcaattcactgtggccacatgtgtatgacacgaagaatctttgcctgatccctgaagaacagtactctgtaaacaaagagccctgaactgccaggtactgctgactcactggtacaggggacatactgaaggcatagatggtaaaaatgtcctggtagtgtcctgaatggcaaaacaactaggtctcagtgtgggcaagtgtaggtaaggcaagaacagtcatgtccacctgtgaacagtgggccaaaacaccttggctctgaggaaaggacagtcgggtggagctggacttctggacacctatcctcttgctgagaggaaagttccacctctcttgcaaaacagaaagaaaaggctcagccctcctttctgatccctgagctattgtgaagtaaaatgtaaactgcttttaagtcatccaaagacagcatgcggaaggtaaagcttttagaaatcaataagatgcatatgatatgaatataacttgcagtaatagatactatttttaactgacaactgtgtgccaggtcactatgtacttacacctatcttctaatttaatctgacagagagtaagttttattatctttattttacacttgagaaaactgaggtcaggcagtgactagctccaaagcctacatccattccaccacaccacatacctccctaactgtatgcaagaatgtgagacggggagtgggattatctccccctgtggtaatggagatgcctagaacttcagagcactggggcagtccacgaatttctccaagaagtcagaataagcagcttcaggaggtgccatctgcacacctctctgtttgggaaaagcaaccatttctactaccctagacaggacagtgaggctccttcaaaactcagaattccttcactcactcactcattcattcattcattaagcttatattgagtacccactgtgttccaggccctgtgcaggctctgagattaagatccagtctccagccttcactcaaaagtggacattgacaattacaagaatcagttgctatgaaagtcactgagaggcaacctatctacccacacgtcactggaggagtgaatggggtgcaggcaagcaccaggatcactgttatctggactgagtgcatggaggctgctgctggggtgggggaggggaagcaatattcctgacagagagggcaaaacgttattaccctgacaatgaaatcagcaatgaatgaagtcaaccacccgtataaaaaaacctacttaagcaataaccagtaaatgatttcaaggtctattagtaataccagactatctagggctgtagttcaacagctctaaaggtagactatgcctgccaaaagactgcaaacaactggcaggagcagagactctgtgtttgctctttggaaactgtcatgatttgaatagaaaaagatgaaaatatggtacaaatatagatcacatttctatgaggtagggaccccattttatagaagagagaactgagggctgggcacggtggctcatgcctgtaatcccagcaatttgagaggccgaggaaggtagatcacctgaggtcaggagtttcagactagcctggccaacatggtgaaaccccatctctactaaaaatacaaaaaattagccgggcatagtggtgggcacctgtaatcccagctactcgggaggctgaggcaggagaatcgcttgaacccaggaggcggaggttgcagtaaactgagattacgccactgcactccagactgggcaacaagagtgaaactctgtcaaaaaaaaagaagaagaagaaggagaaggaggaaaaggagaaggagaaggagaacaagaggaaactgaggctaataaatttgacctagcattgattgaatcctgcctgattccacgctgttcaccaccatgcaccagtgccttccaaagggataagggtatcccctacactgttcaagaaaaagaagtctgactcagggcacccaatcattacagccatggagaaggcatcattgtagggtagagatatttcatccaacttttccagaaacatacctcaaccaacctaaggcaggcttaactctttttcataaaatcgtccctcaaccttggtcctttcctctaacaatcaccctccatgctttcagaatcattcatctgaagagcatgtctacattccttcccgttcctgggtctctacaatgcagtctgagatgttgcaactccttcctctttcaccctgcaaaagttttcctttgaccctctgagttgccaattccaaatgacattttattccttattttaaacttaatagctcctccagaaaggctatttttgagtgtaaacctgccacctctggtatgctgcccttgctctgtgctctcacctccccaattaactacactgcattagaacagtgtacatatgtctctcccacccacgagagctgtgtgagggcagagagtggataacagttatccttgtacccatgggcatagtcctgaactagacacacagtaacacttaatacattttgctgggtgaataaatgatatttctgaaacctgatttcaccctcactgccctgaaatttcattgccttaggagaaagcccacatgaaaagccaccagtgaccttcatatcaataaatccaatcaactatactcaatctttacctagcttgacctcttagcagattggacacaggtagtcattcattccttctcaattcactcccttccactcaccatcttccaggtttccacctatctctctagatgctccttctccatcttttcacaaaatacctatccctcaaatgtgggtattcctcagaatgcttctaagcccctttgtcctccctttctacatcttgtcccaaggtcatctcatctgttcctgtggtttctttttctttttatttttttctttcttttttttttttttttttttttttgagacagaatcttgctctgtcacccaagatggagtgcagtggagctgtctcggctcactgcaacctcttcctccagggttcaagcgattctcctgcctcagcctccagagtagctgggactacaggtgcacaccaccatgcccggctagtttttgtatttttagtagagacagggtttcgccatgttggccaggctggtctcgaactcctggcctcaagtgatcagcccacctcagcctcccaaagtgttgggattacaggtgtgagccaccgccctggcctgttcctatggtttcaataaccatatatacaatgatgactcccaaaagtatatcatcagcccaactgtcatgattctagatatatatgaatattcaaccacctactggacattaccaggcacatcaaactcaacatgtccaaaactgattccatcaatttctcccaaacctactgcaccttcggtgttccccatacaagtaactggcgtcaccatccacccatttatgcaagccaaagacctgggcatgttattgtcatcaacaacttccactcatatctactcatagtccaagtcttaagtctccctgtccccaaaacatgactctagtccaagccaccatcatttctcactaggatcatagcagcagcttcccacctgtctcccagctttcaatcctacatagaaaaactaatctttcttaaactcacaaattctaaaatctaaatcacaaatgccactcttctgcttttaaaggccttaagagttttctcattgccttagaagacagcccaccaaactccttaatatagttggtgcaatagattggagttttccaatatgcctcaacgtctcccatcccatattcctttcttacaatgtgactttgacactctacccatcaagaggcagggtctgtacccctcttctcgaaactggatggtcttctgtgaatgcctctacctatagagtatgacagaattgacaccatgcaacttcagagactaggtcataaaaggcaatgcaacttccactttgggtgctacaacactcattctggacgctttcagctgcctgcataagcagtctgactgcccacgagtcaccacgctgtgagaaagctcaacacagtccatacggaaagaccacatggaaagactgacacaatttgataaagaaggccgggtgcggtggctcacacccgtaatcctaacactttgtttgggaggccgaggcgggtagatcacctgaggtcaggagttcaagactaacctggccaacacggtgaaaccccgtctctactaaaaatataaaaattagccgggcgtggtggggcacgcctgtaatcccagctactcaggaggctgaggaaggagaattgcttgaatctgagaggtggaggttgcagtgagccgagatcgcgccactgcactccaacctgcacaaccggagcaagactccacctcaaaaaaagaaaaaaaagaagcccagattgtctgcaacttcctcagcaaccgtttttccagctcctgtcaccatctgctgcaaccacatgagggaccctgacctagaactgtcccactaagcccttcccaaatttctaagccacagaaatcataaaaaaaatgactactgttttaagacactacgttttagactatttgttatagcacaataataactagcacagcttataaagctttgaacaacctatgccttgactctatttacctctgcaagccaactctcaaccttttcttcctgaaattcaacactgcagcccaccctgaactcctttcagtgcctgaaaggagcacttctggcatttaggttttcatacattctgttcttgctgcttggaacactcctcttctactcttgattaattcttcttcgccattcaggtatcagctcaaacttctacaggaatggtttctaaatgcctaggttaggactggtctcctcctgtgccttgttctaccttgcaaatcacaacaccatcacaatccattaaaaccctgtatcagaggccaggcacggtggctcacgcctgtaatcccagcactttgggaggccgaggcaggcggatcatgaggtcaagagatcaagaccatcctggccaacatggtgaaaccccgtctaaaaaatacaaaaattagctgagcatggtggtgcatgcctgtagtcccagctactcaggaggagacaggagaatctcttgaacctgggaagcagaggttgcagtgagctgagattgcgccactgcactccagcctggtgacagagcgagactccgtctcaaaaaaacaaaacaaaacaaaaatccctgtattgggttgcccatcctgaccccggcatgcacccatgcatgcggtcacacacacccacgcacacacataaagtgctccaaaaagacaatgacagtgcagggaacgtggcaacctcttcgcaaatacttgttgaatgtttaatctccaaccctatctctttcctaaattccaaagagcatatctgcctactatgctaaaaataaattccaaattcaacatgcccccatcctcctcctcacagtaaatgatatcactgcctacaaattgtctaaaccagaaacatcatctcttcattcaaagactatttattgagggccgggcacggtaggtggctcacgcctgcaatcccagcactttgggaggccgaggcaggcagatcacttgagttcaggagttcgagaccagcctggccaacatggtgaaaccccatctgtactaaaaatacaaaaattagcagggcggggtgacatgcacctgtagtcccagctactcaggacactgaggcaggagaatcccttgaacccgggaggcagaggttgcagtgagccaagatcctgctactgtactccagcctgggcgacagagcaagactctgtctcaaaacaacaacaacaacaaccaaacaaacaaacaaaaaaaatatttatcaagcttctctgtttccttgctggggatacagtggattatagataggcacagctcttctggcacaaaacttacaagatggtagatgttttccttgacacttccctctcccttatacttgacatcttaataggtctcattggttgtattgattataccttctaaattgtgctcagatctatccttccttgtccaccccaactgccatcaccgtagttcaggtttttgtcatttcctgcctggattgctacaagagcttcctaatagtgtctctgcctccagccttgtcccctaagttccaccccagctatatcactcccctgtttaaagtcctttaatggttcctcatatgctttgaataaattctaaaaccctacaaagatataccttgtgttctagccccttgcccatcttggtcccctcatatcccacaatcccccatgcacccccacaccccatacatttttttcatcttgtgcctttacattggctttccctgtgcctaaaacgtcctgcccccttcttcattcaacatacaattattgagcacctagcagataccaggcactgttctatgtgctggtgattcagcagtgagtaaaacaaagtccttattcacatatgtttatattctagagggaaagagagacaagtaaatgatgtgttgaacactgttataaagaaaaagaggccaggcacggtggctcatgcctgtaatcccagcaccttgggagaccaaggcgggcagatcgcctgaggtcaggagtttgagaccagcctgactaacatggtgaaaccctatttctgctaaaataccaaaattagccaggcacagtggcagcgcctgtaatcccatctacacaggaggctgaggaaggagaatcgcttgaacccggaaggcggaggttgcagtgagctgagatcgtgccattgcactccagcctgggcaacagagcgagacaccatctcaaaaaaaaagaaaaagaaaacaggatggggaactgagagtgaccattttagatacgataggtctctagtaaggtactatttttgcaaagaggtgaatggagtaagggaataagctctgcaggcatctggagacgtgccttccttgcagaagaaacaaatacaaaatccctgagacatgtatgtgccaggaaaatgcaggagaggcaagaaggccagtgtagctggagcagacaaagtgagggcaagaagtccaaggtgaatcaaagaagtcaggtggagtagggccacataggccacggtagaaatgtgggtgcttcagcccagcctgactcctttcatccttcagtgctgatgcagacatcatcccctgaacaagccactctccacccctgcaagcacctgccacatatacatgtttaagtgactatgtctacctcgcttcccaccacactgtgcgttccctacaggcaggggctccacctttcagttccatgctttatagagcccaacatgttcagaaaaaatttctcaaattattcaaactttcttcttttgttccaattccacaccctgcaagcaacttcctgattactagattggtttcccagttactagggtatcagggaggggatgccttgatagtgaacacacaccttctggtcattagaaattactcatgtgggaaaggattccgtatttaataaatggtgctgtgagaactgcctagccatatgcagaaaattgaaactggagcccttccttatatcttatacaaaaattaactcacgatggattcaagacttaaatgtaaaacccaaaactataaaaaccctagaaaaaaatctagggttttatagcaataccattcaggacataggcacgggcaaagatttcatggcaaaaataccaaaagcaattgccaaaaaagcaaaaattgacaaatgggatcttattaaactaaagagcttctgcacagcaaaataaattatcatcagagggaagagacaacctctacagaatgggagaaaatttttgcaatctatccatctgaaaaaggtctaataaccagagtctacaaggaatttaaacaaatttacaagaaagaaacaaacaatcccattaaaaagtgagaaaaggacatgaacaaacacttctcaaaagaggacattcatgcggccaacaaacatgaaaaaaagctcaacagcactgatcattagagaaatgcaaatcaaaaccacaatgagaaatcatctcacgtcagtcagaatgtcaataattaaaaagtcaagaaacagtcaggcatggtggttcacatctgtaatcccagcacttcgggaggctgaggcaggtggatcacctgaggtcagtagttcaagaccagcctgaccaacatggagaaaccccgtctctaacaatacaaaattagccaaatacaaaattagctgggcatgggggtgtgtacgcctgttatcccagctactcaggaggctaaggcaggagaattccttgaacttgggaggcggaggttgcattgagccgagattgtgccattgcactccagcctgggcaacaagagtgaaacttcgtctcaaaaaacaaaaaacaaacaaacaaaaaaaggcaagaaacaacagatgctgacaagtttgcagagaaaaaggaacacctggccaggtgcagtggctcatgcctgtaatcccagcactttgggaggccaaggcaggtggaccacaaggtcaggagttcaagaccagcctggccaagatggggaaactccatatctactaaaaatacaaaaattagccaggtgtggtggtgggctcctgtaatcctagctactcagaaggctgaggcagagaaccactcaaaacaaggaggcagaggttgcagttagccaagatcatgccactgcattccagcctaggtgacagagcaagactcagtctcaaaagaaaaagaaaggtacggcaagtaagaaaatgtggtacatatataccatgaaatagtatgcagccataaaaaggaatgagatcatgtcctttgcagggacatggatgaaactggaagccattatcctcagcaaactaatgtaggaacagaaaaccaaacaccaaatgttctcacttataagtgggagctgaacggtgagaacacatagacaaatgcgggggaagaacaacacacactggggcctgtcggtagaggttggtagagggagggcatcaggaatcatagctaatggatgctaggcttaatacccaggtgatgggttgatctgtacagcaaacaatcatggcacatgtttacctatgtaacaaagctgcacatcctgcacatgtgccctggaacttaaaataaaagtggaagaaaaattaaataaataaaaattttaaaaaaagaaattacccatgtatgctcatcaataaactgtacatacatcaaaggccgagggcggtggctcacgcctgtaatcccagcactttgggaggctgaggcgggcagatcacgaggtcaggagattgagaccatcctggccaacatggtgaaacctcgtctctactaaaaatacaaaaattagctgggtgtggtggcaggagcctgtaatcccagccactcgggaggctgaggcaggagaatcgcttgaagctgggatctcggctcactgcaacctccgcctactgacatagcgagactctgtctcaaaaaaaaaaaaaaaaaaaaaactgtacatacatcagtaaactgacattatcattcacacatcaatctcttttttttttttttttttttttttttgagacagagtcttgctctgtcgcccaggctagagtgcaatggtgcaatctcggctcactgcaacctccacctcccaggttcaagcgattctcctgcctcagcctcccaagtagctgggattacaggtgcccgccatcatgcccggctaatttttttgtgttttagtagagacagggtttcaccatatcgacctctttttttaggtaagcgtgactcaactgctgggaaaatgacccaaatctgtgtcatgacacccaaagaaggcgctgctcatggaagggccacataagcagcctggcagaagacttggatgccctgtctacctcacactcagcccaccttccctattttagatggcagccccatcacccacacctgtccaagctcaaatctctagcttcatgaactctgagagcttccatattccccatacctagaatatatgggtaatggggtgtgcatgaaggattatgggatatgagaaggccaaagcggcaaaagcacaaggcacaccttcctagggatttagattttatcctaaagcatatgaggagccactggaggattttaaacagggagcaacatactggggtggaaacctatgggcaaggctggaggcagggctttacctgtgagagctccccgacccccggcaaaaagtccttgaaagtccactgttaacttttttttttttttttttttgagacggagtctcgctctgtcgcccaggctagagtgcagtggcgcgatctgggctcactgcaagctccgcttcccgggttcatgccattctcctgcctcagcctcccaagtagctgggactacaggctcctgccaccatgcccggctaattttttctgtatttttagtaaagacgggatttcactgtgttagccaggatggtctcaatctcctgacctcgagatccaccagcctcggcctcccaaagtgctgggattacaggcgtgagccaccgcgccgggccaactatttctttattcataccctcatctctgttcctaaggccactccacagtgcagatattcatcacccttcacatggattcaggtttcagctccctaaaccagtctccccaccttctgtctcttgctctttccaaaaacattctccatgtggccaccagagttctccttttaactaagtctcattatttcactagtccccatacccctgcttaataatcagtagctgtgtagctttgtagctcccacctgtaatcctagctactcaggaggtaggaggattacttgaggccaggagttggaggctgcagtgagctatgactgcaccactgcactcctgcctgggcgacagagcaagaacccccatctctaaaaatataaaaataaacaatagcttccccttatcttttagataaagtccaacctgattataaaacccatctcacccagggctgtctcctcgcccttctcccaccccacattccaaccataccaaaccaacgacctggaattctctgaacattctgtaccttgcacctccacacctttgcacatgcagtctcctgtgtgaaaggtcacaggagacagctatatttattttcaaaattcagctcagacaccatgttctctgcgataccttcctaagctatcctcccctacaaaaataaagttgtcccatttaggtcgggcgtggtagctcatgcctgtagtcccagcaatttgggaagctgaggcgggcagttcgcctgaggttaggagttcgagaccagcctggccaacgtggtgaaaccccgtctctactaaaaacacaaaaattagccgggtgtggtggtgcacagctgtaatcccagctgctcaggaggctggggcaggagaatcgcttaacttgggacatggaggttgcgtgagtgaggcgagatcacaccactgcactccagcctgggcaacaagagtgaaacttcatctcaaaaaaaaaaaaagaagttgccccatttgctcttatggtgcctctatcagtgtacaaattatattgcatgacaattatttgttaacatgtcagtctcctttctggactataaattattgaatggcaagggccagacatcattcttctttgtttttcagcactaagtaaaatatctagcacacacatagcatgccctaattaaattttttctaagggagggaatgtatgaaagctctaaattaaagcccttctcttgctaaatctgaagattctgcctaagttctcacttaggctaatcagaatgtcttcataggtcccagcatctgacttgtgtcaggtgcttattcaacagtgcctgaagaccaggcacaatggctcacgcccgtaatcctagcactttgggaggccaaggcaggcagatagcttgagcccaggagtttgagaccagcctgggcaacatagcgagaccccatctctattaaagaaaattaaaaaacaaaaccaaaacagtggctgaaggaataaacccatgaatcatatgtcactaaattcttagtcttggttgcccttctgaaccttctttagatctctatgctcctctgaagttatcaaagatagaacaaagtccagatattatctatgcagtaatatttcatttatctaaccataactactcagatgaagccaagaagcaggaagaggaacaggactataagtgaccaagaaagacagtaatttgaaacataattcataattcatggttttcactgaatctcattccattctcacaacagcctggaattaaacagtcagtgcacctggctcaaggtcacatagctattgagcccaacctcaaacacaagtgtgtgcacaagtgctgtgcacctttcactctatcagagaaatctcaaatgtgtgtcacacatgtgtgtacaaaactctatgcattttactcactgaagagctctgcatacgaaccataactgcggctactttgcatgtattctttttgttttgttttgttttgtcttttgagacagagtctcgctctgtggcccaggctggagtgcagtagcatgatctcggctactgcaacctctgcttcccgggttcaagcgttcctcctgtgtcagcctccctagtagctgggattataggcacccaccaccacacccagcttttttttttttttttgagacagagtctggctctgtcacccaggctggcgtgcaatggcgcgatctctgctcactgcaacctctgcctcccgggttcaagcgattcccctgcctcagcctcccaagtagctgggactataggcacgcaccaccacacccagctaatttttttgcgtttttcatagagacggggtttcaccatgttggccaggatgatcttgatctcttgacctcgtgatccacccatctcggcctcccaaagtgctgggattccaggcgtgagccaccatgcccggccttttttgtatttttagtagagagggggtttcacgatccgcccatcttagcttcccaaagtgctaggattacaggcatgagcgactgcacccggcctttgcatgtattcttacaaggatgtacaggcacgtgaatgtgtacatgggtgaatgaggatttaaacatgtatgtctctatacccaaattagaagcagaaaattggccaggtgcagtggctgtgaaatcccatctcttctaaaaatacaaaaaattagcttggcgtggtggcgggcgcctgtaatcccagctacttgggaggctgaggcaagagaatcgctggaactcgggaggcggaggttgcagtgagctgagatcgcaccattgcactccagcctgggcaacaagagggaaacactgtctcaaaaaaaaaaaaaaaaaaaaaaaagcagcaacagcagaaaattaaaaagggttgactggcagaggtaggcacaaggtcagaatcgaggaacaagagctgtcagaaatgacacagacaaagatagttaaaataatagaattctaaggccgggaaggtggcccatgcctgtaatcccagcactttgggaggccgaggtaggcggattacctgaggtccggagttcgagactagcctgaccaacatggagaaaccccatctctactaaaaatacaaaattagccgggcatggtagcacatctgtaatcccagctactcgggaggctgaggcaggagaatcacttgaacctgggaggcagaggttgcggtgagccaagatcacgccattgcattccagcctgggcaacaagagcgaaactccatctcaaaaaaaaaaaaaaaaatagatttctggtattttaaaggaatgcagccatcttagaaatattacttagatgaaatgatccttctctgcacatgatataattaaccatatgcccacatttgagggtgctccaagaccaatagatcctaaaattagttttgccagtaagcaacctaccagatcatctgcaagtaatgcaagagaaatcacagatcatatttaagacctcagtgaaggctgggcacagtggctcatgcctgtaatcccagcactttgggaggccaaggcgggcggatcacctgaggtcgggagttcaagaccagcctgaccaacatggagaaaccctgtctctaataaaaatacaaaaattagccaggcgtggtggcacatgcctgtaatcccagctacttgagaggctgaggcaggagaatcacttgaacccgggaggcagaggttgtggtgagccgagattgtgccattgcactccagcctgggcaacaagagtgaaactccgtctcggaaaaaaaaaacctcagtgaaaacccccttcttgcaacacaaagcagtgccttccacccctccctgactgttgccatgtatgacaaacatcccatatgcagagatgagtccaggccagacacaaggacacacaaaacacagaaggaccccacagaagacagccagttctctacacaacagtaaaatcagagaagctggaaaggaagttgaggagtgaatggggcaatacagaaattgaaagaaaaaaggacacaaactgattggagagcggtgagccaatgagcaattgcacctggtgcaaaattcctgtgccccaactgctagagcagctgcccctcaaattgacagaatgtctgagcttcttcacagttgcagggtggaaggcatctctaaggtcctaggctctcccaggttggaagggcatttttcaagaatagtggcatctgagggatggggctatggagaatcatcatctcagcacctccaatggctttactgaatgtacagatttaaataatgttttatttatgagatggagaaaaagccaaggtggactgaaatgacagtattaaaaatctagcccacagaggccgggtgcagtggctcacgcctgtgatcccaacactttgggaagccaaggcaggtagatcacttgagctcaggagttcgagtccagcctggccaacacagtgaaaccccgtctccaccaaaaatacaaaaaaattagctaggcatggtggcacatgcctgtaatcccagctactagggaggctgaggcaggagaatcacttgaacccagaagatggaggttgcagtgagctgagattgcaccactcaagcctgggcgacagagtgactctatctcaaaaaaaaaaaaaaaaaaaaaggaagaatccagcctacagaaatactcatgcagctgcaaaaagatattcactggagcattatctgtaagactgagaaactgaaaccaacgtacatggccattaacagaggaccagctagataaataaactactatgcatccttaaaattcacatgaaataatatgaagcattttttaaaaagtagatctgtaagtagaaaagaatgtcactgataatgctagaggaaaagcacactgtagaattacatgtagactagtatgacctcatttttgtaaaagaacaaaactacacctcttttttttttatttttatttttttgagatagagtctcactctgttgcccaggctggagtgcagtggtgcgatcttggctcaccgcaacctctgcctcctgggttcaagcgattctcctgcctcagcctcctgagtagctgggattacaggcacctgccaccacacccagctaatttttgtatttttagtagagatggggtttcaccatgttggccaggctagtctcgaactcctgacctcaggtgatctgcccacttcagcctcccaaagtgctgggattacaggcataagccaccacaccctgccaaaactacatctcttgaaggaacaagaaaaaaaaatcagtgtgcctgtggtccctgctactcaggaggctgaggcaggaggatagcttgagcctagaagttcgaggctgaagtaaggtataatcacaccactgcactccagtctgggtgacagagcaaaatacctgtctctttaaaaaaaaaaaaaaaaaatcaggaagaatatgcaaactgctaatagtgcttactgtgagaagctggggaaaaggtgagtgtttttgcgatacactgtggtactgtttgaattttcacacaaagcatactttaactatatatatatatatatatgttgtcagagacattcctctctatctccttcttactcccagactgcactcacatcccagcctctgtccagccctccacccaccacctcctaccccagccccacttacaaatgcaggcagcagccagcaggcggctggcagcataaggggcgaagcagctcgggaagagaggctgtaccatgtagttggcaaaggtgatggcaatgatggcctggctggtgggctcaatgatgagcagggaggtccagagtctgatgaaagcaaggaatcctccaaaggcctccaggatataggcatagctggccccagatttcttaatggtggtgcccagttccgcataacaaagggccccaaagacggagaagaggcccccgacagcccagatgaccagagagagaccaaaggaggcactgtatatgagcacacccttgggggaaacaaagatgcccgagccgatcatgttccccacaatcaggcacacgccgttaagcagtgagatctccttcttcagcttcacctgctccggccctgggctggccccatcacccaaaggggaggtttccacctcaggctgggaggccacttcatactcagtgctgtcaaccatggtggaggagaggaaacccttcaccagcttcctggcattgccctttaaggaagaaagatgatgctatagattaggtggttggcaattacatagaacctctacccgcctccaacacagggtaatacgggcagctcaccaaccaatgcggagacctccaaataaccttttctccagctcactcatcaaaacaaccccaacttgaatatttgtctatctatctatgtatttatttatttattgacagagtctcgctctgtagcccaggctggagtgcagtggtgcaatctcggctcggctcactgcaacctcagcctcccgggttcaagcgcttctcttgcctcagcctcccaagtagctgggattacaggcacctgccaccacgcgtggctaattttttttttttttttttgagatggagttttgctcttgttgcccaggctggagtgcaatggcgcgatctcagctcactgcaacctccgcctcccgggttcaagtgattctcctgcctcagcctcccaagtagctgggattataggcatgcaccaccacacccagctaattttgtatttttagtagagatggggtttctccatgttggtcaggatggtctcaaactcccgacctcaggttatccgcccgcctcggcctcccaaagtgctgggattacaggcgtgagccaccttgcccagcctccaacttgaatttttaagagaaggcactcattcgccagagagaaaggatctgtctctcatcattaggacattgctgcccacccgactcaccaaatagagaactaaatcttgggccgggcgctgtggctcacatctgtaaacccagcactttgggaggccaaggcgggcagatcacctaaagtcgggagttcgagaccagcctgaccaacatttagaaacccagtctctactaaaaatacaaaaattagccatgcgtggtggcacatgcctgtaatcccagctgcttgggaggctgaggcaggagaatcacttgagcccgggaggcagaggttgcggtaagctaagactgggccattgcactccagcctgggcaacaagagcaaaactctgtctcaaaaaaaaaacaaaatcaaaaacaaaacactaaatgttggttctctctgagcctgctataatacaagacaggcatgggggcagtgtggcggctcccagaaaataactataatggcttgaccccgagttttcagccttatccaaaacccgtcttccctccaatttcagcttcagggatcacctgtgctgaggtacaacattaggaactgaccctaccagcagctaatctgtgggagcgtctcatgacactgctcttttccccaaggactctacgtctgccaaaactaaaggcttcagaaacctgctggaaacccacaaccatcctcctgcccaaagagcatcccttaacccttagctggagtcttcagccctggcaaagcccaagtagacccacttcaccctgaaagaagacaggctattatcttttccttgcttttcctttcccattctctggtattctaagcctcctgctatcgatccctcacatcagcatcgttgaatcacccaaaaaagtatgaatgagagaagggcgatccaatgtaccataaaacctagggatgattggaggcagctgatggccactccctaccccagagttgctgctggagagatatcaccccgagccaaggcagggagacagctgcagccaggcagcacatgctggaaaacaccgaacaggagacagctgagaggaaaatgggagaggctagtcaagcaatggagagatgttagggtgagaggcactcgggagaagaagcgattagacactgcacagcagcaaagaggagggttagcaaggtaagtggagatgagaagagggtggaacgcacactcactccttggtcctggatataagcaggttctcacggcagtgtgagcagcagtcagggagagaagtgccttccaggatctgtggtctgatgctcctccttcccagccagcagtaaaaggg

SEQ ID NO: 106 - DNA, 10190 bp, Homo sapiens
  source 1..10190: mol_type = genomic DNA
ctttccggcggttgcaccgggccggggtgccagcgcccgccttcccgtttcctcccgttccgcagcgcgcccacggcctgtgaccccggcgaccgctccccagtgacgagagagcggggccgggcgctgctccggcctgacctgcgaagggacctcggtccagtcccctgttgcgccgcgccccctgtccgtccgtgcgcgggccagtcaggggccagtgtctcgagcggtcgaggtcgcagacctagaggcgccccacaggccggcccggggcgctgggagcgccggccgcgggccgggtggggatgcctctgcacgtgaagtggccgttccccgcggtgccgccgctcacctggaccctggccagcagcgtcgtcatgggcttggtgggcacctacagctgcttctggaccagtgagtgggcccaggccgaggcaggcccgcccgggtacccatgcccggccggaggtgggacttagggtgggggacgccgcggccccgacctagcgggcgagcccggagcgcctgacctctccttccccgccagagtacatgaaccacctgaccgtgcacaacagggaggtgctgtacgagctcatcgagaagcgaggcccggccacgcccctcatcaccgtgtccaatcaccagtcctgcatggacgaccctcatctctggggtacccgggccagtgtgctgggcagggggaggaaaggcgaggattcgggacgggcccagcctcgtcagaacaaaccccttctcgctgccttttcatggagccctggcactccggtttccgggcgttctgccccagggctgagacttggatttgtggctcctgcagcatccctgagggagcatgatttggagagggccttgggcatggagcaggaccaaggaacggccacagggcatatcttacagctcctttaacgtcaggcctccagaaccctctgttctctaaaccatccagggccccacagtcttgggaaaaatttgggggttggacataggatatcctgtgaggaagttctgggccagggactggaagcccagtgtcctggcttcaggtttgcccctggctgggcgtgtaccgttcagccctatttgggagcctggttgccacacctagaggttcctgctctgctgacttcacaggaagttgcttggctctggtaaccagatggccgggtggaggggtgcctggggcttccactcctgaacagagagcttaactgtcctagagttcatggggagccacctagccacactggagcccttcagagctcaccctggctgctgggtggagaaaggcctatagatgtcacaggtggatcctgggaggccaggaaggaggacttggagccatccactagcctagactgggctggttgcagtgacagtacagggagaagtatagaagaatgggcattgtccaagtatgttggggaggtaggcagtccaggtgcagtgattagtaagatgtggagggtgggggagagggaggagccagggagaactgaatgatctggcctaagggtctgaaagatgccactttgggctgtagggaaatggtagtgctgctgtccctcattccctgagatggggtgaaggaagggcactccctggggatatgggaagttggggcatgaagcctttcctgtcctctagggatcctgaaactccgccacatctggaacctgaagttgatgcgttggtgaggaggaatgggcccctcgaagtgggccgggccggccccacctgcctctgcccagatttgccctcctcctgctctgcccaggaggtggcgtccagcagtccaggcagggcatggggtggggccccgcaggccctcccctgtgcctcccttctgcatgctgatgctgggggcagggtggtggagcggggtgcagggggcaggactaattgcatctgtccctgcttaggacccctgcagctgcagacatctgcttcaccaaggagctacactcccacttcttcagcttgggcaagtgtgtgcctgtgtgccgaggtgagctgctcctccagcgagtgcagggaggcacttctggggcaggaaagctggtggccagtgtctctgttttggagggacctatgggggtaggcatcccgggagccaacatgaggcccagctccatcacatgccagcagaggggacagaggctgtgggaggagggatgggtccttggaaagtcctcaactctctgcaactgcccagggatcctgtggacctggagccttggcattagaattcaaggaggcattatccataaccccttctctcagggatgtcactaagagactcattgagaacagtgcgttgtcattggtccatggtggcagtagcatgtacctgcaggccagagggttttgcttctaggagaacaaacaggcttgtggggtgagaaccccaggggataggggccattttgatccctattctccagacagggaggatcacagagattaagctgctggcccaaggtcatggggtaggaggtggcaaagccaggatttgaatccagattgctccttcctctgcaggagcagaatttttccaagcagagaatgaggggaaaggtgttctagacacaggcaggcacatgccaggtgctggaaaaagaagagagaaaggtaagccaggcatagcggttcacacttgtcatcccagcactttgtgaggtcgaggtgagaggatcactcaagcccaggagtttgagaccagcctgggcaacatagtaagaccctgtctctttaaaaataaaaatattttaaacaaaagaaaggtagaaaatatgagttgtatgtagaatatgaaggttctagaataatcctattaagaattttggattctggctgggcgcggtggctcacgcctgtaatcccagcactttgggaggctgaggccagcggatcacgaggtcaggagatcgagaccatcctggctaacacggtgaaaccccgtctctactaaaaatacaaaaaattagctgggcatggtagtgggcgcctgtagtcccagctactcgggaggctgaggcaggagaatggcgtgaacccggaaggtggagcttgcagtgagccaagatcacgccactgcactccagcctgggtgacagagtgagactccgtctcaaaaaaaaaaaaaaaaagtgccggccatggtggctcatgcctgtaatcccagcactctgggaggccgaggcgggcggatcacgaggtcaggaattcgagaccagcctaaccaacatggtgaaaccccgtctctactaaaaatacaaaaattagccgggcgtggtggtgtgtgcctgtaatctcagctacttgggagactgagacgggagcattgcttgaacccgggaggtggaggttgtggtgagctgagatcctgccattgcactccagcctgggcaataagagcgaaactccgtctgaaaaaaaaaaaaaaaaaaaagaattttgaattagctggctgcattggtgcatgcctacagtcccagctcctcaggaggctgaggtgggaggatcacttgagccctcgattttctttttccttgagacaatgtctgtttctgttgtccaggctggagtgccgtggcgtgatgatggctcactgcagcttctgtttcctgggttcaagggatcctgtcacctcagcctcctgagcagctgggactaaggagtgtgcccagctaattcttttttttttttggtagagttggggtcttactacattgccagggctggtcttgaactcctagactcaagcgatcctcccgcctcagcctctcaagtgctgggatcacaggcatgagccattgtgcccaacccagcccaggaatttgaggccagcctgagcaatatagtgagaccccaggtatagatagataggtagatagataggtaggtaggtaggtagatagatagatacgtaggtgggtaggtaggtgggtagataggtaggtaggtacgtaggtagatagatagatagatacatacatacatagatagataagatagatagattgattagatagattagatagccaggtggggtggctcacgcctgtaatcccagtgctttgggaggctgaggtgggtggatcacctgaggtcaggagtttgagaccagcctggctaatgtggcgaaaccctgtctactaaaaatacaaaaattagctggatgtggtggcgcacgcctgtaatctcagctactcgggaggctggggtgggagaatcgcttgaacccaggaggtggaggttgcagtgagctgagatcatgccactgcactccagcctgggccacagagggagacctggtctcaaaaaaaaaaaaaaaaaaaaaaaaaagatttttgtatttgactgtgctctctcatccaggtggtgacatgcttgtatctgtggttaagaggtagtatctgccgggcgcggtggctcatgcctgtaatcccagtactttgcgaggccgaggcgggtggttcacctgaggtcaggagtttgagaccagcctgaccaacatggcgaaaccccgtctctactaaaaatataaaaattagccgaggctgggcgcggtggctcacgcctgtaatcccagcactttgggaggccgaggcgggtggatcacgaggtcaggagatcgagaccatcctggctaacaggatgaaaccccgtctctactaaaaacacaaaattagctgggcatggtggcaggtgcctgtagtcccagctactcgggaggctgaggcaggagaatggcacaaacccgggaggcggagcttgaggcaggagaatggcgtgaacccgggaggcagagcttgctatgagcagagatcgcgccactgcactccagcctgggtgacagagcgagactccgtctcaaaaaaaaaaaaaagagagagataccattccagttgcaatgtggctgcagcagggctaggtggacatgaggagcccagttcagggctgtcacagtagctccagcagcagatgattgtggctgggcctcccaagtgtcacgttggagaaccggagaaggggacttctttgggatgtactctggacttgttgatagattaagtgtaggtggggtgaggaagagaactcaaagatgacaccaggtgttggagctgagccacggggagaagggtgcaaagggaaagcagtgcgggggctgggaggggagagggtcagtcctgttttgcttgtgctgcatctgaggagcccctcacctgtggaaggagagcagtcccagaggcagtggggtgtgcagttctggaacttagaagaatgatcagggggctgggtgcagtggctcacgcctgtaatcccagcactttgggaggccgaggcgggcggatcaagaggtcaggagattgagaccatcctggctaacatggtgaaaccccatctctactaaaaatataaaaaattagcagcgcatggtggcaggcacctgtagtcccagctattcaggaggctgaggcaggagagtggcgtgaacccgggagacggagcttgcagtgagctgagattgcgccactgcactccagcctgggcgacagagcgagactccgtctcaaaaaaaaaaaaaacaaaaaattatcaggaataaagatactgggaattcaaccacaaaaaccacaaagtcacgaatgcagagtgagagtcttcagagagagggcagaggcccaggatggcacagagggagagagaagccaccaagatggcagggagccatggccagagagaaaagcaaaccaggcgcctgtggcaccatggaagcagcaggtgatgctggagaagcgtttccatgcagtgacagctgccagagccagattattatggcctgagggctggtggtgctgcagttgggggggaatggagaccgcagcgggggaatggagaccgcaggggcggcaactcctcccagaggttcagtttggaggaaaaagagacagaaggaagggtaaccaaaggatattagaggtcaaggaggggtttattatttctagctggtcaaagtagaatgtggtaaaacccaataaagtaacagcaaataacaaagaggggcttttaatggaaagctgcagtgcctgcccctcacctccctagccccactcctcagaagcagccccctggagcggtttctctttctgctgcttttggaggctacttctgtctctgtaaaggaacttctgtctctgtaaaggaacaagcagaggccacagtgtcttggcaaatgaccgtggcattgtttatcccaacctgctctgagagatggggactctgctgattcacccctcgtccctgcctctttagttccttcagcaaagaactaataatatgtcattaaggcaaaggcagtatttggcacacttggcttctgtgttccaaaaaattccctttttctccaagcgtagattttaatatggtatttaagtatcaaagtgatttgacacaagtgacacaagtgagcagtagtagcatttgcaaaagctacaaatgatgaagtcttgctccaaaagcatattattattattttttaaattccagtttcaagctcaatggataggttgcgtcagtgggttttagtagagaaggggccagtacctatgaagactcccctgtactattacacatgctgcgtcccaagtagggaaactccagtgggtcatcaccccctccctctagcccaagtgggctgctgggtcagggcactgtttgggttgggttgagattcctggatccctaactagcaccttccaaagaatcggccttgcagagaacaaagttcattgccaaaggtattcccaatgtctgtctctcgctctgtgatagggcttctttactccccactttataagatgaggatatctgctataccccattccttcaacctctccacctctttcctcttttgtctgccatgtgattacttttccatcaccaaggttgatgagatccttactgtgtacttactgtctccaagcatccccaggcttccagccagcacgcagcagccaacattggcttcagaaggaaggaggtttgcatttccttctcttgggtccagtgccatggtctcagggttatctccaatgtggaaagttgctagaccaggagcagtttgactccactgtttttcagtctagcaagtttgagtttttcccaagctcttgatgtgtgttcaaatgaatgttctccctttcccaagagacctccctataagggagggtctagtttcccggggtgccctgagaagaaggggtcagcaggggggaggaatggtggaggctgaggcctcaggcaggtgccctgtgaggagtggctgtgacaagcggctgagatcccagcaaagggttgttgcccagaatctggggcctaagcgaggttggaaatcacaaatgcacttggtttctctagcagctggcacatagtaggatcagcccaggagtggcaccttcaaagagaaaggaacgcatgaggctccgagagcggtcggctggcagccagggcctggctggggagggagggcaggtggtgcgctgacctggggatctttgagagtgtgcaggagtatgtggctgaagcggcccagctggtgagccactgaagatgggggtcataggtagatggaggaattgccaggtcagaatctcggtaggagatgacttgagctgatgctgcctggcacataggggtttagaagatattaggaaggaagccccacagcgtgcccaagtgccatgcaggccctggagacggtcattggagggcgtctgtggatggcgcagtgggggatgggaagtccctaatctgctggggctttcccagcaagcagggactgagggggatagtccccaacacatgggccccagggagaagggcctgtttcattgaggtttggagagtgttgagggtaagctaacctgtcaccccacgcccccgagaatggttactgatagggagaggccttttccttgcaggagatggcgtctaccagaaggggatggacttcattttggagaagctcaaccatggggactgggtgcatatcttcccagaaggtcagcagggctgactgggtcgagcccccccagtatgagcgggatgggctcccaagcctcgcctctgtgctctctcaccagggaaagtgaacatgagttccgaattcctgcgtttcaagtggggtaagggctgctggtctctggccacagccatcctcccggcccagagatggccctgtgggcccctggctcccgccccctcgggctggcttgtatgggggtagatgggcgtgtttgtagcgccaggaaggggacaggtgctgagactaggcctgcctctcgcaggggcttgcccaagggagctgaattgaactggaggatgtcgggggtggcagtggccagaggctggcacagaagcttggctcagggcccagcttatgctaacatttctacctcccccctgggcaggaatcgggcgcctgattgctgagtgtcatctcaaccccatcatcctgcccctgtggcatgtcggtgagcctggggacggggacagagagatggcatctggggtggggggcctgggactccctctggtcccaggctgccctgctccaccccacgtctggccttctgtccactgtgctgcaggaatgaatgacgtccttcctaacagtccgccctacttcccccgctttggacaggtgggtggggactgctgaccttcggctgtctgcctgtctgctgtctgctccgtgtctcccactcagcactatggaggccagctgcaggaggagctgagcatgaggctacagcaggggacagagtggaacatagacagggacttcctggcaccgagacattaaaatgagagcagaggaagtcaggctggggcagaggtgggctgtggggtcaggacaggacaggtcatctacagcacaggacccaggaccaggaccttgttttagaggaagagtggcccctggggagtgtgtggcacagcagggccggggcttagcttctggctcccgggttgcttgggctggggctgtgggcactcctactgctcctcatcactcttggcggccaccccacagaaaatcactgtgctgatcgggaagcccttcagtgccctgcctgtactcgagcggctccgggcggagaacaagtcggctgtgagtttcctcctgggtcccccgtagctgtccccggaccccctgctgctggcttccagcagggtgcctccaccctctccatcccgtcaccctcccagggcaccctcccagggcaccttggccaagcttcccgaggggtgcaggccatccctggtcctttccctcaggtggagatgcggaaagccctgacggacttcattcaagaggaattccagcatctgaagactcaggcagagcagctccacaaccacctccagcctgggagataggccttgcttgctgccttctggattcttggcccgcacagagctggggctgagggatggactgatgcttttagctcaaacgtggcttttagacagatttgttcatagaccctctcaagtgccctctccgagctggtaggcattccagctcctccgtgcttcctcagttacacaaaggacctcagctgcttctcccacttggccaagcagggaggaagaagcttaggcagggctctctttccttcttgccttcagatgttctctcccaggggctggcttcaggagggagcatagaaggcaggtgagcaaccagttggctaggggagcagggggcccaccagagctgtggagaggggaccctaagactcctcggcctggctcctacccaccgcccttgccgaaccaggagctgctcactacctcctcagggatggccgttggccacgtcttccttctgcctgagcttccccccgaccacaggccctttcctcaggcaaggtctggcctcaggtgggccgcaggcgggaaaagcagcccttggccagaagtcaagcccagccacgtggagcctagagtgagggcctgaggtctggctgcttgcccccatgctggcgccaacaacttctccatcctttctgcctctcaacatcacttgaatcctagggcctgggttttcatgtttttgaaacagaaccataaagcatatgtgttggcttgttgtaaaa

SEQ ID NO: 107 - DNA, 10190 bp, Homo sapiens; identical to SEQ ID NO: 106
  source 1..10190: mol_type = genomic DNA

SEQ ID NO: 108 - DNA, 10190 bp, Homo sapiens; identical to SEQ ID NO: 106
  source 1..10190: mol_type = genomic DNA

SEQ ID NO: 109 - DNA, 10190 bp, Homo sapiens; identical to SEQ ID NO: 106
  source 1..10190: mol_type = genomic DNA

SEQ ID NO: 110 - DNA, 10190 bp, Homo sapiens; identical to SEQ ID NO: 106
  source 1..10190: mol_type = genomic DNA

SEQ ID NO: 111 - DNA, 10190 bp, Homo sapiens; identical to SEQ ID NO: 106
  source 1..10190: mol_type = genomic DNA

SEQ ID NO: 112 - DNA, 24 bp, Homo sapiens
  source 1..24: mol_type = genomic DNA
cagatactatttttgccaacatgc

SEQ ID NO: 113 - DNA, 24 bp, Homo sapiens
  source 1..24: mol_type = genomic DNA
aggcagtgacccatcagtatatgt

SEQ ID NO: 114 - DNA, 326 bp, Homo sapiens
  source 1..326: mol_type = genomic DNA
cnnnnnnnnnnnngnnnnnnnnnnnnnttgnacctcaccaagnagggtttttgcacaataatagggtgtgcttctctgatgcttttcactggaanaccacatagcacattgctgctttattccataaagctgcctctttcccctgggctgtcanaataggaagatgtgttgtgattttttttttcaaananattgcattccttcccnggctttgncccaccccanctgnttnttnttcaggnaaatgctgcgnttttggngccaggananaccantgtgntttntttttccctgagtgacatatacngangggncactgcataaan

SEQ ID NO: 115 - DNA, 446 bp, Homo sapiens
  source 1..446: mol_type = genomic DNA
nnnnnnnnnnnnnnnnnnntnnnnntatcctggcaccnannncgcagcntntccctgaacaacaagcagctgggctgggacaaagccagggaaggaatgcaatctctttgaaaaaaaaaatcacaacacntcttcctattctgacancccaggggaaanaggcanctttntggaataaancancaatgngctatgtggtcttccantgaaaancatcanaaaancncnccctattnttgngcaaaaacccctactnggngaggngcaagtccaaaaaattccctgtntggactacagggcatgttggcaaaaanaanatcngaaangtncatctttactctccttgtgntcanangaggtggggnnctctnccttnntttanntnnncanngcaagatctccgnttcntnnatgctgntcnccggannnncagganntngnaatan

SEQ ID NO: 116 - DNA, 7746 bp, Homo sapiens
  source 1..7746: mol_type = genomic DNA
cttccacctagcaggggcactagaagcttctgtggcatctgtccctgggttctgtgatttgcacaagagaatgctcaacttttccactccacattttactatgtaaggaatgaaaccaaaactgtgtatgtctctctgtctccagagcctttggtggaaacaagtccttctgcctttgttctcctatctctcagatggtggttgataacccccatcttgttatcagcatttcctgcctctattccttgggtgtctttgaataaataatttccttttcttctagacacaaataagagctaacataggaattaacttaagcaaattgagtcttcttgaggagctcctgtgcaaagatgtctggatgtcagcagatcatgtttcttggcaagagagaaggacaatgaattcatggaggctagatcatctagggccctatttgcaaggaatttggctgtttctcagcatgagatgagaaggcatcagaggatactgaatagagaagtgacataacctacatagaacttaaccttagttgcactactctcttgctagcttcctgctcttcctccaacatgcaggcacacttcctcctcagggctttggtacttgctcttctatttgcttgagacgtttgtcccacagatagctgcacggctcagtgcctcaccttctcagcaacatccttcctggtcaccctatttaatacttaaacttcttatactttttcttcgctactttattttccttcattgcatttatctaatactatgtgttaactgtctatgtcatttattttctgtcaaagaaaaataattatattctggacagctggtctgttttttatcaaatagggaatggaaatcttttaactgattatatctttccttcttttatttttggaattagctctaataagctcagcaaactttgtgtaagatctaattaaggggtatcttcttgtatgctaactcttccagatttcatcttactatttggtcatcattacatttgacccagatttaaatttttaaaaaatgtattactgttttatatctacttttgtttcaaataatctttaagcaaggcatgtcataaagaagaatttatccttatatctcctatacccagtgaagtttgtgcatatagaacatgttaataagctgaatatgatatgtaaaatgtaataaaatgttaaaaatattcatatcctatttacctcgggaggtttatactttatttttatttaatttttttataatttcaaattttatgttagatttgggggtaatgagcaggtttgttacataggtatattgtgtgatgccgaggtttgggatacaaatgatcccatctcccagatactaagcatagtacccaacagtttttcaacccttgtccccatacctctctccccactccaacagtcttcagtttctattgttgccatttttgtgtccatgagtactcagtgtttaggtcccacttataggcaagaacatgcagtatttggtgttttgttcctgcattaattcgcttaggataatagccccagctgcatccacgttgctggaaagaacataatttcattcttttttgtggctgtttagtatcccatggtgtatatgtagcacattttctgtatccaatctaccattaaaggcacctaggttgattccacgtctttgctattctgaagagtgctgcaataaatatgtgcatgcatgtgtctttttggtagaacaatatatacatacatatatatatatatatatatatatatctccagtaatgcagtcatggggttgctgggctgaatggtagttctgctttgagttctttgagaaatctctaaactgctttccacagtggctgagctaattaacattcccatcaacagtgtataagcattcccttttcttcacagcctcgccagcatcggttgttttttgactttttaataacggccattcttactggtatgagattgtatcttattttggttttgacttgtgtttctctgatgattagttatgtggagcattttttcatgtttgctgacgtatgaagatgacatatgttgtatgtcttcttgttagaagtgtctgtccatgtcttttgcccattttttaatggggtttgagcatagaatatttttccactggtttgtgtcatctattatttctttgagcagtgttttgtagtagttctccttgtagaaatctttcacctccttggttaaatatatttctaggtattttattttatttttttctgtggctattgtaaatgggattgcattcttgatttggttctcagcttgagtgttattggtgtatggaaatgctagtgagttttgacactgattttgtattgtgaatctttacaaagttatttatcagttccaggagccttttggtgggtctttagggttttctaggcgtagaatcatatcagtgaagagagacagtttgacatcttctttacttatttggatgccttttatttccctctcttgccttcaaaccagagatctatctaggcatggagctgggaaacctttctggccccaagttctctgcatggggatggaaggcagcctaaattcttattccagtagagtgggtgctctagatgcttggagatctgcctgggtgtggagtgtagagggccttgctggaccacaatctctgcacagatagggcgggagagctcaggctggcaagccaggataacaggtactcttactgcttggagatatgcctgtgcatggagtaaagagggctgtgcttcaccatggtgtctgaacaggatgggtgggctggctcaggctgttgattcaggtgagtggatgctccaaatgcctggatatctgccagagggtggagcagagagggcctgggcttcaccacagtctccacacaggaatggttgggtggcttggtatgctgatctgggtgaatggtagctgcaactgctaggagatctgcctgggcatgaagcagagagggccctgctgtaccatgatctctgcacaggcagggtggggtatcttaggttgctagtcaatgtcaccaggtgtttcaaatacctggatttctgcctgggagtggagtggagagggacccactgcaccgtgatcccagagaaggaggttgggccacccagaaatgatacacataaacctgttctatgtctccaagctggtcctggctgcaagtctcctcatccaggagaaactggatgagcagctttcctccagctccaggcctgtgacaggggagagcacaattccagtgcctactgatgaggcactttctgtaattctggctgtagagacctctacaccactccagagcaagcgctccaatctctggcccaagacaaaaatgcctgtgcagccacggtgccagattgccaaagaatggctgactttgtatgcactcgggttaaaaacggcatcctgctttcagtcctgggtctgagaaaatgcctgcagcttttccctgtgtcttttcctctcagcacttccaagcctctctccaagttagctccaggacttgggagaaaaaagtgctctccctcagcctaggttgctgggatccccagtggaaaggtgagtagtagagggaggctctcctcccctctcacgtactggggcttcacacattgtcagccagatgccatcatgagggctgtttgcccacgttcttctccttgggagctggagtatctttcacaatatcaggggattcgtgttgtattagtttgttctcacactgtatgaagaaattcccaagactggataatttataaggaaaaaaggtttaattgactcacagttatccacggtttttaggggaggcctcaggaagcttacaattatggtggaaggcacatcttcacagggtggcaggagagagaatgagtgccaagcaaagggggaagccccttataaaaccatcagatctcatgagaactcatccactatcatgaaaacagcatgggggaaccgcccccatgattcaattatctccacctgatcccgcccttgacacctggggattatcatttcaagattacaattcaagatgagatttgggtggggacacagccatgtgatatcatcccaccactggctcctcccaaatctcatgtcctcaaatttcaaaacacaatcatgccctcccaacagtcccccaaagtcttaattcattccagcattaacccaaaagtcaaagtccaaagtttcatctgagataaggcaagtctcttctgcctatagggctataaaatccaaagcaagttagttccttcctagatacagtggaggtacaggccttgggtaaatacacctattccaaatgggagaaattggccaaaacaaagggtctacagtccccatgcaagtccgacattcaatagggcagtcattaaaacttaaagctccaaaatgatctcctttgactcttatgtctcatatccaggtcacactgatgcaagaggaaggctcccacatccttggcagctctgcccctgtggctttgcagggtgcaggctcctcccagctgttttcacgactggcactgagtgtttgcagttttccaggcgtactgtgaaagctggtgatggatctaccattctggggtctggaggatggtggccctcttctcacagctccactaggcagtgccccagtggggactttgtgtgggggctccaaccccatctttcccttccacactgccctagcagagggttctccatgagggctctaaccctacagcaaatttctgcttggacatctaggtgtttccatatatcctctgaaatctaggtggaggtccccaaacttcaattcttgacttctctgcacccacaggctcaacaccatgtggaaactgccaggcttggggcttgtgccctctgaagccatggccagagctgtaccttgggcatttttagccatggctagagtggctgggaaacagagcaccaagtctctaggctgcacacatcggggggccctggacctggtcccaggaaaccatattttcctcccaggcctctgggcctataatgggaggggctgccatgaaggtcactgacataccctggggacattttcccattgtcttggtgattaacattctgctccttgttacttagcaaattgctgtgataggcttgaatttctcctcaggaaatgggtttttcttttctattgcatcatcaggctgcaaattttccaaacttttatgctctgcttcccttttaaacataagttgcaatcccaaaccatatctttgtgaatacgtaaaactgaatgcttttaacagcacccaagtcacttcttgaatgctttgctgcttagaaatttcttccaccagataccctaaatcatctctctcaagttcaaagttctacagatctctagggcaggggcaaaataccaccagtccctttgctaaagcatagcaatactcacctttattctaattcccaacaagttcctcatctctatctgagaccatctcagcctggacttcattgtccatatctctgtcagcattttagtcaaaaccattagacaagtctctaggaagttccaaactttctcacatcttcctgtcttcttctgagccctccaaactgttccaacctctgcctgttacccacttctaaagtcatctccacattttcagctatctttacagcagcctcccattacccagtaccaagttactgtattagtctgttttcaggctgtgatgaaaaaattcctgaaactgtgtaatttataagggaaaaaggtttaattgactcacagttccacatggctggagagccctcaagaaacttgcaattatggcaggaggcacctcctcacagggtggcaggagagaaaatgagtgccgagaagtggggaaagccctttatatagccatcagatcttgtgagaacccactcaccatcatgagaacagcatgggggaaactgcccccatgattcaattatttccacctggtcccacccttgacacgtggagattatcacaactcaaggtgagatttgagtggggacacaaagccaaaccatattaccaattttccttctcgaattaatgctcacagagttgatctttgtgcaatatcttgctatttccaagtggtcgaggcacactgaaagcttctaatccaccatcttgggaaaaaataatctctctctctctatatatatatatttttttatatatatgtatattttatatatatataatatatatataaaagagagatatagagatatctatgagatacatatagatatatatatttatatataaaagagatataaatatagagatatattttttatatatatatacacacatatatacatataatgttaaaaagcatcttttcaaataaatgctgcttgcatatgttaatttagtttgaacaattttggagtggatttcaggacaggagagagaaaaaagcaaagagcaaaacaactccactctaaagggaagtcatagttcctgggtctgagtggtgcttcttgcctccatcctgccctgacccttcatagtctcgtgactttcacattgctctaataagatatcaaaatttgagtgaggggttcagttcctatctctgttctcccagtaatgcaacaaaaagggtaacttgtccctcctctttacattttaaaataaggaagggttgaattagctcagtgtttctcaaggcttgattcaccttaattgactgaagagctttttaaaaatcccaatttctttggcccttgtcatagacattctgattccttttatttggcagaagacccaggcactgacctaatttttaaaagttctgtatatggttctcttgtgcaggcagaattgagatcattggctttgctaaggtatctccagcactgacatcctgtgactaggtggataatttaactcttcctaactctacagaaaaagtgagaagctctagagattccactggtaacctcttcaaggttatgtcacatgctgccactagatggcgcaggcaattcttgggacggaggagattctggttatttgggattttcattttccctgtgcaatatacttgagacactcagcttaagaagcttcgtgggggaatgacattttagctcctttcccaaagctcgaggcccagaaggtagagctgttttgcttgacaagttgatagagagagactcattaaataaacgttctatcgtctgaagggagaaagtaaaacccccggcataaatattagttcacatttttcttattatttccagcaggtgtgtgttctccccttctctgtgtctttctctctcttactctttgttggtggcctctttttacctttatcttttcccttttcttggtttctgtctgtaaccactgtttgtaaactggttatgatgaatttacaggtggattaaatcttagtttgccacctttgtcgtagataaaaattttaggaatccaaaaacgatacctacacaatattcttagaagggtgaacacattcaggttacaatggaaaaattcttattcaggagacttcctctgcaatgttgtttgttcatagcagctgtggtagcacccgccaaatccaggaagaaagaattttatgccgtatcagggaaaaacagtcaaaatcctttcctctttacagcacaattcgggtgacggccaaagctcttagtgtacat

SEQ ID NO: 117 - DNA, 2272 bp, Homo sapiens
  variation 229: note = A->G
  source 1..2272: mol_type = genomic DNA
cgcatatcaggtgtgtgcatacacccccgatttgggggctggtttgccatccgaggggtagtgctgctgccagggatagaggtgccagatctgccacccagaaaacctcatgactgtgtacctacaagagctgaccgtatcgccctactcgaaggcttcaatttccactggcgtgattggacttaccgggatgctgtgacaccccaggagcgctactcagaagagcagaaggcctacttctccactccacctgcccaacgattggccctattgggcttggctcagccctcagagaagcctagttctccctccccggaccttccctttaccacacccgcccccaagaagcctgggaatcccagcagagcccggagctggctcagccccagggtctcaccacctgcatcccctggcccttgattttctcccatgtggaccctgatttatggtggtacttgctaggacttaattggctttggcaaagcaaaaggttttgagtacaagattactatttttgataatatagtagagatcttccatgaagataacaaggctcaaggaagttaggtttggccaagataaaggccagggaaccagaattcccatctgccttcaaatgagttttttttttttttttagacagagtcttactctgtcacctaggctggagtgcagtggcacagtctctactcactgcaacctctgcctcctgggttcaagcaattatctgcctcagcctcctgagtagctgggatgacaggtgcctgccactacacctggctaattttttgtatttttagtagagatggggtttcatcatattggccaggctggtctttaactcctgacctcgtgatccacccatcttggcctcccaaagtcctgggattacaggaatgagccaccgcacccagccaagactctatctgttcccatttctaagcagttccccaagatgttgttacagggcctaaggggcaaatatcctctaaagagtacctaccagcagggtgtggtggctcccgcctgtaatcccagcactctgggaggccgaggcaggtggatcatgaggtcgagtttgagaccagcctggccaatacagtgaaaccccgtctctactaaaaatgcaaagttagccgggcatggtagcgcaggcctgtagtcccagctactcaggaggctgaggcagtagaatcatttgaaccagggaggcagagattgcagtgagccgagattgcatggctgcactctagcctgggtgacagtgtgagactctgtctcaaaaaaaaaaaaaaaagtacctacctcaggtagggactgaataaacacgtgtaaggcactttggaaaaatacctggcatatatagtaagcagtatgttggccattaccaaaggccctgggaattctgtactgctgctcatgggtgtagtcggttctagaggggtgggcaggtgggagtagctgaggaagacaagtggctggaatggtatcacatgatacacagaagtatcctcagttctgaatctaccttggcctcaagggcccaggagaataacttttcccagctgacagcctctctgaggacaatgacatatgaatgaggatcaaaacgagctttggccaggcactgtggcgctcacctgtaatcccaccattttgggaggctgaggcggaggaccgcctgaggcaaggaattcagaaccactctgggcaacataatgacactaaaaaagactatctctaatcaaggctagaaccaagggaaggctaagaattgcccagtactgtgcaactacgaaagccctacccaaggccaccagccttgtcttcctctttcctctgtcagttcaaaaagaacagaaacctccagctcttttacatagcaggtaccaggcatttatcagaagaggccaagcttctggttcccatgcagccctttgaatagtgtgtctaaacaaaaataggtgtccaagtagtcacactgagactttaactggtaacccagcctgtggcgtcagtcgcagtgctctggccaacactatagcagggcttattcttctccctcatgtgtagtgaaacaaaatgtaacaccttgggttcattcagttccattccctatatctacctgtgtcaatataattccctgatttggaggcagctctcctcattttccccaaaacagggaaagcaaggagtaaattcctcttaaaatcaaaagctaataatatgcttcctaaaataaagactcatcaaggtctcagttcaagtttaa

SEQ ID NO: 118 - DNA, 119 bp, Homo sapiens
  variation 110: note = G->A
  source 1..119: mol_type = genomic DNA
atcaattattttcagaggtgcaggataaaggcctttagtctgctttcgcactttttcttccacttttttgtaaacctgttgcctgacaaatggaatagtcatggcatacgctgtcaatt

SEQ ID NO: 119 - DNA, 145 bp, Homo sapiens
  variation 82: note = C->A
  source 1..145: mol_type = genomic DNA
atatatctggaggtgcagcagccacatgagactcatccgaacctgatgatcctgcagtcgaaaaggctttgggattgacaacccttttaactaaagagcaaaatcctgggagataggaaaccagtctggctctgttacaaagcac

SEQ ID NO: 120 - DNA, 1000 bp, Homo sapiens
  variation 500..504: note = CTACA->C
  source 1..1000: mol_type = genomic DNA
aggggcactagaagcttctgtggcatctgtccctgggttctgtgatttgcacaagagaatgctcaacttttccactccacattttactatgtaaggaatgaaaccaaaactgtgtatgtctctctgtctccagagcctttggtggaaacaagtccttctgcctttgttctcctatctctcagatggtggttgataacccccatcttgttatcagcatttcctgcctctattccttgggtgtctttgaataaataatttccttttcttctagacacaaataagagctaacataggaattaacttaagcaaattgagtcttcttgaggagctcctgtgcaaagatgtctggatgtcagcagatcatgtttcttggcaagagagaaggacaatgaattcatggaggctagatcatctagggccctatttgcaaggaatttggctgtttctcagcatgagatgagaaggcatcagaggatactgaatagagaagtgacataacctacatagaacttaaccttagttgcactactctcttgctagcttcctgctcttcctccaacatgcaggcacacttcctcctcagggctttggtacttgctcttctatttgcttgagacgtttgtcccacagatagctgcacggctcagtgcctcaccttctcagcaacatccttcctggtcaccctatttaatacttaaacttcttatactttttcttcgctactttattttccttcattgcatttatctaatactatgtgttaactgtctatgtcatttattttctgtcaaagaaaaataattatattctggacagctggtctgttttttatcaaatagggaatggaaatcttttaactgattatatctttccttcttttatttttggaattagctctaataagctcagcaaactttgtgtaagatctaattaaggggtatcttcttgtatgctaactcttccagatttcatcttactatttggtcatcattacatttga

SEQ ID NO: 121 - DNA, 1000 bp, Homo sapiens
  variation 500: note = A->ATC
  source 1..1000: mol_type = genomic DNA
tgggggtaatgagcaggtttgttacataggtatattgtgtgatgccgaggtttgggatacaaatgatcccatctcccagatactaagcatagtacccaacagtttttcaacccttgtccccatacctctctccccactccaacagtcttcagtttctattgttgccatttttgtgtccatgagtactcagtgtttaggtcccacttataggcaagaacatgcagtatttggtgttttgttcctgcattaattcgcttaggataatagccccagctgcatccacgttgctggaaagaacataatttcattcttttttgtggctgtttagtatcccatggtgtatatgtagcacattttctgtatccaatctaccattaaaggcacctaggttgattccacgtctttgctattctgaagagtgctgcaataaatatgtgcatgcatgtgtctttttggtagaacaatatatacatacatatatatatatatatatatatatatctccagtaatgcagtcatggggttgctgggctgaatggtagttctgctttgagttctttgagaaatctctaaactgctttccacagtggctgagctaattaacattcccatcaacagtgtataagcattcccttttcttcacagcctcgccagcatcggttgttttttgactttttaataacggccattcttactggtatgagattgtatcttattttggttttgacttgtgtttctctgatgattagttatgtggagcattttttcatgtttgctgacgtatgaagatgacatatgttgtatgtcttcttgttagaagtgtctgtccatgtcttttgcccattttttaatggggtttgagcatagaatatttttccactggtttgtgtcatctattatttctttgagcagtgttttgtagtagttctccttgtagaaatctttcacctccttggttaaatatatttctaggtattttattttatttttttctgtggct

SEQ ID NO: 122 - DNA, 1000 bp, Homo sapiens
  variation 500: note = G->T
  source 1..1000: mol_type = genomic DNA
gcatggagctgggaaacctttctggccccaagttctctgcatggggatggaaggcagcctaaattcttattccagtagagtgggtgctctagatgcttggagatctgcctgggtgtggagtgtagagggccttgctggaccacaatctctgcacagatagggcgggagagctcaggctggcaagccaggataacaggtactcttactgcttggagatatgcctgtgcatggagtaaagagggctgtgcttcaccatggtgtctgaacaggatgggtgggctggctcaggctgttgattcaggtgagtggatgctccaaatgcctggatatctgccagagggtggagcagagagggcctgggcttcaccacagtctccacacaggaatggttgggtggcttggtatgctgatctgggtgaatggtagctgcaactgctaggagatctgcctgggcatgaagcagagagggccctgctgtaccatgatctctgcacaggcagggtggggtatcttaggttgctagtcaatgtcaccaggtgtttcaaatacctggatttctgcctgggagtggagtggagagggacccactgcaccgtgatcccagagaaggaggttgggccacccagaaatgatacacataaacctgttctatgtctccaagctggtcctggctgcaagtctcctcatccaggagaaactggatgagcagctttcctccagctccaggcctgtgacaggggagagcacaattccagtgcctactgatgaggcactttctgtaattctggctgtagagacctctacaccactccagagcaagcgctccaatctctggcccaagacaaaaatgcctgtgcagccacggtgccagattgccaaagaatggctgactttgtatgcactcgggttaaaaacggcatcctgctttcagtcctgggtctgagaaaatgcctgcagcttttccctgtgtcttttcctctcagcacttccaagcctctct

SEQ ID NO: 123 - DNA, 1000 bp, Homo sapiens
  variation 500..501: note = AT->A
  source 1..1000: mol_type = genomic DNA
tactgtattagtctgttttcaggctgtgatgaaaaaattcctgaaactgtgtaatttataagggaaaaaggtttaattgactcacagttccacatggctggagagccctcaagaaacttgcaattatggcaggaggcacctcctcacagggtggcaggagagaaaatgagtgccgagaagtggggaaagccctttatatagccatcagatcttgtgagaacccactcaccatcatgagaacagcatgggggaaactgcccccatgattcaattatttccacctggtcccacccttgacacgtggagattatcacaactcaaggtgagatttgagtggggacacaaagccaaaccatattaccaattttccttctcgaattaatgctcacagagttgatctttgtgcaatatcttgctatttccaagtggtcgaggcacactgaaagcttctaatccaccatcttgggaaaaaataatctctctctctctatatatatatatttttttatatatatgtatattttatatatatataatatatatataaaagagagatatagagatatctatgagatacatatagatatatatatttatatataaaagagatataaatatagagatatattttttatatatatatacacacatatatacatataatgttaaaaagcatcttttcaaataaatgctgcttgcatatgttaatttagtttgaacaattttggagtggatttcaggacaggagagagaaaaaagcaaagagcaaaacaactccactctaaagggaagtcatagttcctgggtctgagtggtgcttcttgcctccatcctgccctgacccttcatagtctcgtgactttcacattgctctaataagatatcaaaatttgagtgaggggttcagttcctatctctgttctcccagtaatgcaacaaaaagggtaacttgtccctcctctttacattttaaaataaggaagggttgaattagctcagt

SEQ ID NO: 124 - DNA, 1000 bp, Homo sapiens
  variation 500: note = T->TTA
  source 1..1000: mol_type = genomic DNA
gaggcacctcctcacagggtggcaggagagaaaatgagtgccgagaagtggggaaagccctttatatagccatcagatcttgtgagaacccactcaccatcatgagaacagcatgggggaaactgcccccatgattcaattatttccacctggtcccacccttgacacgtggagattatcacaactcaaggtgagatttgagtggggacacaaagccaaaccatattaccaattttccttctcgaattaatgctcacagagttgatctttgtgcaatatcttgctatttccaagtggtcgaggcacactgaaagcttctaatccaccatcttgggaaaaaataatctctctctctctatatatatatatttttttatatatatgtatattttatatatatataatatatatataaaagagagatatagagatatctatgagatacatatagatatatatatttatatataaaagagatataaatatagagatatattttttatatatatatacacacatatatacatataatgttaaaaagcatcttttcaaataaatgctgcttgcatatgttaatttagtttgaacaattttggagtggatttcaggacaggagagagaaaaaagcaaagagcaaaacaactccactctaaagggaagtcatagttcctgggtctgagtggtgcttcttgcctccatcctgccctgacccttcatagtctcgtgactttcacattgctctaataagatatcaaaatttgagtgaggggttcagttcctatctctgttctcccagtaatgcaacaaaaagggtaacttgtccctcctctttacattttaaaataaggaagggttgaattagctcagtgtttctcaaggcttgattcaccttaattgactgaagagctttttaaaaatcccaatttctttggcccttgtcatagacattctgattccttttatttggcagaagacccaggcactgacctaatttttaaaa

SEQ ID NO: 125 - DNA, 1000 bp, Homo sapiens
  variation 500: note = C->A
  source 1..1000: mol_type = genomic DNA
aatcctttcctctttacagcacaattcgggtgacggccaaagctcttagtgtacatacaagtaggggtttttgcacaataatagggtgtgcttctctgatgcttttcactggaagaccacatagcacattgctgctttattccataaagctgcctctttcccctgggctgtcagaataggaagatgtgttgtgattttttttttcaaagagattgcattccttccctggctttgtcccagcccagctgcttgttgttcagggagatgctgcgcttttggtgccaggatataccactgtgctttctttttccctgagtgacatatactgatgggtcactgcctgaaacagtggaacaaggcatggtgtgtgtccacccgtgaagatccattgtttattcttccctagtttccatctagcagcatcaggttcccatcttcattaagaaacaaaacaaccgaccaaacaaataaaaccccacaaacaatgcaaaataaaccaccacaaatgcaagaaaaaagtcttttttaaattttacattaatagctaacgttgagtgcaaactatattctggatattgttttaatcacttgtcatatgttgtgtcattaatcctcacatcagtgtcatgagctaggtcctattattatccccattttacagatgaagaaattgagtaaaagtagggttaagtaagttgctcaatgtcatgcagctgataagttgctgagccaagctctgattccaggcaatctgacacagtacaccttaactctgtatctagattccaaagggttgtgtattggagtaacaagcaagtaaaggatagattctccaattggatagttgttagaaaagggtgtatttcctgttaatgtagctatatttcttttggtataagattcaacagatgctccaaacccagttctaccccatgctggaggacctaagtacattgtggcatacccacttcttactggcagaaaaattaaaaggcgggaa

SEQ ID NO: 126 - DNA, 93 bp, Homo sapiens
  variation 75: note = G->A
  source 1..93: mol_type = genomic DNA
ctctctaaaaagagtcttccggaaacagtcaaaggtcccagagtacatgggaggttgtccaggcaaactcggtggctgtgtctgcagtcggac

SEQ ID NO: 127 - DNA, 156 bp, Homo sapiens
  variation 73: note = C->T
  source 1..156: mol_type = genomic DNA
caatcttggtaccctccatgttcaggatgggactgtgtgcccgcatgggggccccctcacacatcaaccccacacgcctccgctgcaccctgcccttcagctggggaacaatgaccttggctccagggaagtccatagcagctcggcggcgcttcc

SEQ ID NO: 128 - DNA, 121 bp, Homo sapiens
  variation 109: note = G->A
  source 1..121: mol_type = genomic DNA
gtgtggcccacagagcttttgaaaatgatgttgatgccttgtgtaatctccgggatttcttcaactacctgcccctgagcagtcaggacccggctcccgtccgtgagtgccacgatcccag

SEQ ID NO: 129 - DNA, 101 bp, Homo sapiens
  variation 54: note = G->A
  source 1..101: mol_type = genomic DNA
gcacagcacaggaatacgggggcatcatccggcatggtgccaagcttctctacgcatttgctgaggcaactgtacccaaagtcacagtcatcaccaggaag

SEQ ID NO: 130 - DNA, 265 bp, Homo sapiens
  variation 108: note = A->G
  source 1..265: mol_type = genomic DNA
ggtttgtggatgacatcatccaaccttcttccacacgtgcccgaatctgctgtgacctggatgtcttggccagcaagaaggtacaacgtccttggagaaaacatgcaaatattccattgtaaacaaatcaaaggaaaagaaaccaagaactgaattactgtctgcccattcacatcccattcctgccttttgcaatcatgaaacctgggaatccaaatagttggataacttagaataactaagtttattaaattctagaaagatc

SEQ ID NO: 131 - DNA, 138 bp, Homo sapiens
  variation 78: note = G->T
  source 1..138: mol_type = genomic DNA
cttggaaaataggtaaatagtgttttccaggataatcagcttcgctttactagcaactccattaacagaacatttcaggtaagtgcagtctccctcgctgtaaagattaccaaggacttggaaagttttatcttcaat

SEQ ID NO: 132 - DNA, 4889 bp, Homo sapiens
  variation 187: note = C->T
  source 1..4889: mol_type = genomic DNA
gtaattcgtatttctgcccgaagtggagaggggatctctgaaatgtgggataaaatgaaagatttccaggacctaatgcttgccagtggggagctgactgccaaacgacggaagcaacagaaagtttggatgtggaatctcattcaggaaagtgtgttagagcatttcaggacccaccccacagtccgggaacagattccacttctggaacaaaaggttctcattggggccctgtccccaggactagcagcagacttcttgttaaaagcttttaaaagcagagactaataaaattcatcctgtataataattttacatatcatttcataaagtattttaatagaaaaatcacttgtatgcttatattttcagtaattattgtatggtgctcttgtcttctttgtttgtgacccatgcttgaaaacttgaaggaagttagatatgaatggcaaaagttaggcagtatttataaggtacctgttttatgttactgatatctgtttccttctcttcttataccctggcatggtggcctgtagggtagtttcttcttaatagtcaagaacagagaaagctgaggagagcagaaaatatcttgcactttaaaatgcttattttgattccatattatctgaatttccagagaggatgtaaacaagagtgaccatatttttggagtccttcttgaagccagaacaacacacagtgggttgctaagagccgacaatcataattgacatttagtgtaccagattattctaagaatttctgaaattaccatgtacatgagtaatgaaacaactggaataatgtgatgatgtgaacacaattttaaagtctgcttgtctggatttgcaggtacccttccgccaccccccaacatgataggtaagagagcaaaagggaactgggaaaaatcagctacaaataaaatgggtgactaatccccagttcttggacccattatatttgtagccaattggagtaaacccctaaaagacaaagtgaggtcagaatgattcaaggattattcagtttgaagactaccaaaggcttttgcttctcttcttccttggccatttcacttcattttagtattttaaaaatcttttttcttgatggtgaacaagttttgtcctatgctatggaggaggcatagcacagtgattaagagcttgggctctgtagttggactatgtgggtttaaactttaaacccagatcaattgtatattagctacatgagctaatctctttaagcttccatttcctccctggtaaaatgaaattggcaaataactttctaaggttagtgaagataggaaatactcgaaggctgcttactatccttattacattaaagttatgggtatcttgaaactacaaacctgatgtataatttcagttttctctcatggtcttgttactaccatcatactcttgatattttaggatactttaggattacctttgaagaaccctttctagttaattctttgaatatgttttatacttatttgatggtagttgtaactgtgtacatttgaataaaatttctaaccataaaatttcgccattgcacaaaaagcctttatagaagtttctaacatattctattctgaaccctgtagaatattttatgtagtatagcagcttgcattgttacttactgtactggaatcaaacctcttgagcattattttaacaaacatccctttacattttttggaaagatttttagtactccattggcatagctatttcatacaaggattaggagaaactttgaaaggttatccacttgacttttctgattttagaaaggactaccattaaaccaccctatcagacaaaaaaaactggtttttagaaacctgagagaaggaattttataatttccctgagtaagctgttacagggaataacaaatctcctgccacatgtggcacagtgtaagtaatgctggagcacacatactgcattgtaaagaaggtaggaaaggtggggggacttttgttagctttaattttaaggctaaaagcatttcttctcagtttgaactacttttaaatgttataaatgtcatcataaaaatcattagaaaactcatttctccttatgttgtcgttgtaccattgggtattgtatagagaccaatttctaagagattttttcacctctgtttctgttatttgctatactggaggtaatataataataatgaaatatagctttttttttcaactcagaaatcctattccctctccccatctgtgattatattgtactggacttctgacttggtcaaaagcataggttttgacttagatacatgtgggggcagatctcagctctatcactaactagctatatgatatttggcaagttttttctctatgtgcagtagtttctttatctgtaaaattaagataatagctactttacagggttggaagaattaatttagaaattgtacagtgcttagcctcaataattggtaggtggtggtgtaaatattttacatagatacttgtgacagttctttgttctacaaaacagactaatattaatttcagattggccaagctacttaatttctctgtgcctcagtttcctcactattaaatggggatgacaatagtgtccacctagagcaggactattttagtattacatataatccttggatataaatgctgatgaagtttggatatttgtccccacccaagtctcatgttgaaatgtaatccccaatcttggaggtggagcctggtgggaggtgtatggattagatcagatctctcatgaatgacttgggccatcctttgggtggtaagtgagctcttgctccgagttcacacgaggtctagatctggtcatttaaaagtgtgtggcatctccccatccctcactctatcacttgctcctactttcgtcatatgacatgcctgctcccctttcaccttctgccatgattgtaagcttcctgaggcctccctagaagctgagcagatgccagcaccatgcttcctgtagtctgtagaaccataagccaaataaacatcttttctttataaatttataaattacccagtcgcagatatttatagaaagaacagcctaatacaggtgctaaatacatatctgacaataaatggtagttatctcttagaactgttatgaggattaaacgagttacagtgtccatcttaaaaagataattctgaaaaaaatctcataggttcactttgccttgtcaagaatatgattaccattaacttctgtagataggaaaaaaatgtgctgagctccaaaactgacagacattttgctaaaacaatatcaaatctcattaaaatgatgacagttatttcaatagttgacagtagctatcccaatacaacctaacaaggcattttctcttcagaatcactcgatcatatggccatttccctaagcttttatagctattgcccagtgtacactgaagacaacagctaacgaacaacatacgtgtgataatttatgtagttgaacctctaaggcaaaaaaaaaaaaaaaaaggaaaaattagtgaaaatcattcaaacattatgctcaccaggtagactgccatcatagaagtcctaatgctactgctaaaaactagtaaactaccagtaaactgtgaagacagaagtaactcctgtgatctatatgtttgtgcagatggtggagcttttctgctcctaaagcctgagaaatgcaaatgtggcttcgttaatgcaaatgcttcctacgccagactttatgaaactcctcctaaagttgaattcttatccaagtggacatatgttagggtgccattgtaattcaggtagagtgtcagagtggtggctggcaccaacggtagatgttctcaacattagcgttattcaggtaagactacaacaatgatgaacatgtcaaaactttcctttaaaaggaacaatcagaaaaactctttaacaaatgtttttctttccgtagtattttaattaaaatttttaaaattttaaaatttactaaatttatgaacgtttttatcccacttgagatgaatacttatttatagtccctgtcccatgaagcttctgtggatttgctttgtttgtcatttgtggtatgtttgataacaaaaatattagtggcacaaaagcagttatattgaatgcttttgttttagagaaaatttcactctgtactagaaaatgtagatgatgtgagtcaaagttcattaatatttacctgaaaatttgtgtataaaggtaaccttggggcagtttattttgcttagacccctcagcttcttgatagagtgaggtgagggcatatgtaagtcagtaaactattctgttagtaaagtcaaaggcgtaatctaaattaattatgcttttaactaacacagaagaaatcatgtgacctcattctcaaagctcgtaacatccacctggccaatcttaagatgtggatagagttcttttttttcttttttcaatttttacaataatttttgacacattgaagctgtgcatgtttatgggggcacaatttgatgtttcaatacatgtatatgttgtgtaatgatcaaatcggagtacttagcatatctatcatctcgtgcatttatcatttctttgtggcgagaacatttaaaaatcctattttctagctattttgtaatatacactaccttactgttgcgaaccatagtcaccctactgtgcaatagaacacctgaacttattcctcctatctagttgtaactttgtacccattgaccccccttcccttccttccactctcccctccccagtctctggtaaccactgttctgttccctatgagataaaactttttttgtcttccata

SEQ ID NO: 133 - DNA, 168 bp, Homo sapiens
  variation 99: note = C->T
  source 1..168: mol_type = genomic DNA
ctgaggtggtatcacccctccacacatgacaagaatatctggccgtccaagggagttaagttctttgatgagttcaggaactagggttttatgaccagcagcgagggtgcttatgcccacagcatgcacatccgcatccacagcctgctgggccacttcacgaggagt

SEQ ID NO: 134 - DNA, 584 bp, Homo sapiens
  variation 448: note = C->G
  source 1..584: mol_type = genomic DNA
cttacttcagctggtggatttggggaataaggatttgcagaacaagcgagaattctaatgactgctccgggatgataggtttctagaacatgtacagctgtaggatacacctgttgttcaaaagtaagttccacatagtcctggctctgaaaattaggtggcgtcctcttgaatggcaaggaagcactaggacactgatcccaccatgtcccataagttcgaaacacagctgtctgagtaaagtcaccagaacttgggaatacatttggtacaccagccaaattccacatagtataggacatactattctcacttccataatgggaactgaaatccactacttctttggcatactggactacctctgcattgagaggggaagtctggctgtttgattctatagctctatgggtgttcatcatttctcctcttgtagctgtcctggctcggcgccgaaggcatatataataaaacatggtcagaactgttaacatgggaaagaccggtgacatctagatgtgaattatgaagcttcaaaaggtcaggtgtcctcagtaagatgcatgaactctttgaaggatgtt

SEQ ID NO: 135 - DNA, 85 bp, Homo sapiens
  variation 24: note = A->G
  source 1..85: mol_type = genomic DNA
cacgggaagcagcctgatgccccagaagaaaaaccccgacagtttggagctgatccggagcaaggctgggcgtgtgtttgggcgg

SEQ ID NO: 136 - DNA, 159 bp, Homo sapiens
  variation 90: note = C->A
  source 1..159: mol_type = genomic DNA
ctctatacagtccaaagaagccttcatagcgtagcactttcttaaaacagtcaaagctgtttttatacatgagttctcccacaaaagagccagttgatcgttggttctgcattcgagtttttacaagatcgataggatacacagcagtggctccaacag

SEQ ID NO: 137 - DNA, 250 bp, Homo sapiens
  variation 64: note = T->C
  source 1..250: mol_type = genomic DNA
ctgtgtccaggggagtccctctggtacaggccaccagggcccccatgctgggctgtgaagtcatcccagacatggaatcagctgccacatccaccacatcagctccagcctgggcacaggccagcatggctgccacgcctgcccctgacgtgtcgtgggtgtggatgtgcagtgggaggtcggggaagcggtcccggagggagctgaccagcatggtgcaggccgtgggcttcagcagcccggccatgtc

SEQ ID NO: 138 - DNA, 938 bp, Homo sapiens
  variation 705: note = G->A
  source 1..938: mol_type = genomic DNA
acaaacctgaaacgaaatctttgcaaccagtacagcctgcgcggggcgcggcccagtccatcccccttcggatgcgcagaagcagaggtcaccacgccggacccctcgattccctcgcgggcgattcctggctccttcaccaccccagcactccaagacccccgccctttggcctgaggctcccactgccctagccagttcccgggctcacttccagcttttccagaaagcttggccacgcccctcggcccagactctcaggccactcggccgcaattaacccgcgtctctgcgcctttttaggcccctccccctcggtcgtgcccttgtcatctcttaggccccgtctcaccctttcggatgcctcccctagaaccctaccactttccacccctttccgtctgttatttctcccaaacttgcgcccgcacaggcccctctggaacactcctgccccgtagtgcccctcgtccccgctccgtagagaaagagcgtgcgtgccgcgcatttctggcctggggagcgggtggagtaaacctgcgggaaccattttacgacaacgtgcggctgtgcggtgtggctgacggcaacgccgctgctcttggagaggtcactccggagacggcgttggttttggggtgtggggggttggtggcactatgtggcgcgtctgtgcgcgacgggctcagaatgtagccccatgggcgggactcgaggctcggtggacggccttgcaggaggtacccggaactccacgagtgacctcgcgatctggcccggctcccgctcgtcgcaacagcgtgactacagggtatggcggggtccgggcactgtgcggctggacccccagttctggggccacgccgcggaaccgcttactgctgcagcttttggggtcgcccggccgccgctattacagtcttcccccgcatcagaag

SEQ ID NO: 139 - DNA, 108 bp, Homo sapiens
  variation 61: note = G->A
  source 1..108: mol_type = genomic DNA
gttattgcacagcgattaatgcaatcaaagcaaaccatacctcattattacctttctatcgatgtaaatatgggagaagttttgttggtacggaaagaacttaataag

SEQ ID NO: 140 - DNA, 116 bp, Homo sapiens
  variation 8: note = A->G
  source 1..116: mol_type = genomic DNA
atattagaagggagaagcaaaatttctgtcaatgacttcatcataaaagcttcagctttggcatgtttaaaagttcccgaagcaaattcttcttggatggacacagttataagaca

SEQ ID NO: 141 - DNA, 150 bp, Homo sapiens
  variation 17: note = C->T
  source 1..150: mol_type = genomic DNA
cttgaggggacgaggtcgatcaggctccttccagcgcagataaagctgacccacaatagaaagccccacaaagaaccagtagctgaagctgtagtagttaatgagctggaagatgtcttccacgcacaagtagatcaatgccatgatacc

SEQ ID NO: 142 - DNA, 105 bp, Homo sapiens
  variation 103: note = G->A
  source 1..105: mol_type = genomic DNA
ctgtcaccacagtgcggatgttcttgctatgtcctaggagctcacactcgtctcccttctttaaaatgccacgctctagtgtacctgtcaccacggtgccacggc

SEQ ID NO: 143 - DNA, 113 bp, Homo sapiens
  variation 86: note = C->T
  source 1..113: mol_type = genomic DNA
gaaatgaatggggtgctgaaaggaatgctctcagaatggttttcctccgggttcctgaacctagaacgggttacctggcattcaccgtgtgaagtgcttcagaaaatcagtga

SEQ ID NO: 144 - DNA, 1227 bp, Homo sapiens
  variation 149: note = T->A
  source 1..1227: mol_type = genomic DNA
agagagtttcctcaccttggggtgttttcaagtctgtcacctatacctggtttcaccaaatggcttctggggcttctgaactcgcaaacgaaggagcatgggaggaatgaactctttacagattcggaatgtaaggaaatctcggagatcacaggtggccccattaacgagaccctcaagctcctcctcagcagcagcgagtgggtgcagtcggagaagctggtgcgggcgctgcagactccgctgatgaggctgtgcgcctggtacctgtatggagagaagcaccgcggctacgcgctgaaccccgtggccaacttccacctgcagaacggggcggtgctgtggcgcatcaactggatggcggatgtgagcctcagaggcatcaccggctcctgcggcctgatggccaactaccgctacttcctggaggagacgggccccaacagcacctcctacctcggctccaagatcatcaaagcctctgagcaggtcctcagcctagtggcccagtttcaaaagaacagcaagctctgacagtaaacctctcctaaagcacagggccccggctaagaaaacgatcattttcaggaggggccgggagttatgtatctgaagcagctttccaagcaaagccaaagttgactgtgttcttgtcccgcagccggtccacactgtgaggccaggcctcaacttccctcaccctgggcgtgacatgcacccagtgcaagacggttgtgggtgcgggtgcacacaaatgagtgggttgctgtgctgtctccggaagattctgtcgttgcccttggcctggctccctgcccggggctggtgctgtggtacctacatcttcaggaagctgtgcagcctctgccattgccatcccagggggatctggcatcctcctaaggaccggggcgcgtggcccagataagaataggtgttcctttgtgctcataaaacagaatgcggcgatggttgctttagccgtttctcaccatgcaatgcagagggacaaagggctgtgctacacttcccagttacattctgaagctcataaatgtatgagaaggtttgtgattttgcacaaggtgtgtgtagtaagttaaattgttgaacacaaaaatgttgctgcttgaggcataagttggataataggctttaaatgatcagggattcaggttcataatgaacttcacagtaaagaacacgtttgttctgtaaagcattgaa

SEQ ID NO: 145 - DNA, 1227 bp, Homo sapiens; identical to SEQ ID NO: 144
  variation 329: note = A->G
  source 1..1227: mol_type = genomic DNA

SEQ ID NO: 146 - DNA, 126 bp, Homo sapiens
  variation 103: note = G->C
  source 1..126: mol_type = genomic DNA
taatgggggcctagcagacatcttcacggtctttgccaagacaccagttacagatccagccacaggagccgtgaaggagaagatcacagcttttgtggtggagaggggcttcgggggcattaccca

SEQ ID NO: 147 - DNA, 172 bp, Homo sapiens
  variation 75: note = C->G
  source 1..172: mol_type = genomic DNA
ggtccgggaccctgttcaagaacgccgagcgaatgctacgggtgcgcagcctggacaagctggaccagggccgtctagtggacctggtcaacgccagcttcggcaagaagctcagggacgactacctggcctcgctgcgcccgcggctgcactccatctacgtctccgaggg

SEQ ID NO: 148 - DNA, 172 bp, Homo sapiens; identical to SEQ ID NO: 147
  variation 135: note = C->A
  source 1..172: mol_type = genomic DNA

SEQ ID NO: 149 - DNA, 115 bp, Homo sapiens
  variation 85: note = C->T
  source 1..115: mol_type = genomic DNA
caataagtatataaaatgtttctcccatgagtgttgagttaaccagaactccgccgatcttcatgaggtcactgtaataaatatcgttgggccacttcactcgtaagttgatatc

SEQ ID NO: 150 - DNA, 1305 bp, Homo sapiens
  variation 13: note = A->G
  source 1..1305: mol_type = genomic DNA
gaccctggtttgatatgtacctatctgctcgagactccgttgttctgaactttaatccatttatggctttcaatcctgacccaaaatctgagtataatgaccagctcacccgggcaaccaacatgactgtttctgccatccggtttctgaagacactccgggctggccttctggagccagaagtgttccacttgaaccctgcaaaaagtgacactatcaccttcaagagactcatacgctttgtgccttcctctctgtcctggtatggggcctacctggtcaatgcgtatcccctggatatgtcccagtattttcggcttttcaactcaactcgtttacccaaacccagtcgggatgaactcttcactgatgacaaggccagacacctcctggtcctaaggaaaggaaatttttatatctttgatgtcctggatcaagatgggaacattgtgagcccctcggaaatccaggcacatctgaagtacattctctcagacagcagccccgcccccgagtttcccctggcatacctgaccagtgagaaccgagacatctgggcagagctcaggcagaagctgatgagtagtggcaatgaggagagcctgaggaaagtggactcggcagtgttctgtctctgcctagatgacttccccattaaggaccttgtccacttgtcccacaatatgctgcatggggatggcacaaaccgctggtttgataaatcctttaacctcattatcgccaaggatggctctactgccgtccactttgagcactcttggggtgatggtgtggcagtgctcagattttttaatgaagtatttaaagacagcactcagacccctgccgtcactccacagagccagccagctaccactgactctactgtcacggtgcagaaactcaacttcgagctgactgatgccttaaagactggcatcacagctgctaaggaaaagtttgatgccaccatgaaaaccctcactattgactgcgtccagtttcagagaggaggcaaagaattcctgaagaagcaaaagctgagccctgacgcagttgcccagctggcattccagatggccttcctgcggcagtacgggcagacagtggccacctacgagtcctgtagcactgccgcattcaagcacggccgcactgagaccatccgcccggcctccgtctatacaaagaggtgctctgaggcctttgtcagggagccctccaggcacagtgctggtgagcttcagcagatgatggttgagtgctccaagtaccatggccagctgaccaaagaagcagcaatgg

SEQ ID NO: 151 - DNA, 1305 bp, Homo sapiens; identical to SEQ ID NO: 150
  variation 619: note = C->T
  source 1..1305: mol_type = genomic DNA

SEQ ID NO: 152 - DNA, 1305 bp, Homo sapiens; identical to SEQ ID NO: 150
  variation 715: note = T->G
  source 1..1305: mol_type = genomic DNA

SEQ ID NO: 153 - DNA, 1305 bp, Homo sapiens; identical to SEQ ID NO: 150
  variation 1002: note = T->C
  source 1..1305: mol_type = genomic DNA

SEQ ID NO: 154 - DNA, 120 bp, Homo sapiens
  variation 14: note = C->G
  source 1..120: mol_type = genomic DNA
cattttgggcagcctttgtgtgcctcctgctcctggtaaggcccccagcaaaacttcaggggtacctaatactgtttttctgtcttttgttgctattctgtattggcatgaaatggcaac

SEQ ID NO: 155 - DNA, 1000 bp, Homo sapiens
  variation 500: note = C->T
  source 1..1000: mol_type = genomic DNA
acagccatgtgatatcatcccaccactggctcctcccaaatctcatgtcctcaaatttcaaaacacaatcatgccctcccaacagtcccccaaagtcttaattcattccagcattaacccaaaagtcaaagtccaaagtttcatctgagataaggcaagtctcttctgcctatagggctataaaatccaaagcaagttagttccttcctagatacagtggaggtacaggccttgggtaaatacacctattccaaatgggagaaattggccaaaacaaagggtctacagtccccatgcaagtccgacattcaatagggcagtcattaaaacttaaagctccaaaatgatctcctttgactcttatgtctcatatccaggtcacactgatgcaagaggaaggctcccacatccttggcagctctgcccctgtggctttgcagggtgcaggctcctcccagctgttttcacgactggcactgagtgtttgcagttttccaggcgtactgtgaaagctggtgatggatctaccattctggggtctggaggatggtggccctcttctcacagctccactaggcagtgccccagtggggactttgtgtgggggctccaaccccatctttcccttccacactgccctagcagagggttctccatgagggctctaaccctacagcaaatttctgcttggacatctaggtgtttccatatatcctctgaaatctaggtggaggtccccaaacttcaattcttgacttctctgcacccacaggctcaacaccatgtggaaactgccaggcttggggcttgtgccctctgaagccatggccagagctgtaccttgggcatttttagccatggctagagtggctgggaaacagagcaccaagtctctaggctgcacacatcggggggccctggacctggtcccaggaaaccatattttcctcccaggcctctgggcctataatgggaggggctgccatgaaggtcactgaca

SEQ ID NO: 156 - DNA, 1000 bp, Homo sapiens
  variation 500: note = A->G
  source 1..1000: mol_type = genomic DNA
gggtctacagtccccatgcaagtccgacattcaatagggcagtcattaaaacttaaagctccaaaatgatctcctttgactcttatgtctcatatccaggtcacactgatgcaagaggaaggctcccacatccttggcagctctgcccctgtggctttgcagggtgcaggctcctcccagctgttttcacgactggcactgagtgtttgcagttttccaggcgtactgtgaaagctggtgatggatctaccattctggggtctggaggatggtggccctcttctcacagctccactaggcagtgccccagtggggactttgtgtgggggctccaaccccatctttcccttccacactgccctagcagagggttctccatgagggctctaaccctacagcaaatttctgcttggacatctaggtgtttccatatatcctctgaaatctaggtggaggtccccaaacttcaattcttgacttctctgcacccacaggctcaacaccatgtggaaactgccaggcttggggcttgtgccctctgaagccatggccagagctgtaccttgggcatttttagccatggctagagtggctgggaaacagagcaccaagtctctaggctgcacacatcggggggccctggacctggtcccaggaaaccatattttcctcccaggcctctgggcctataatgggaggggctgccatgaaggtcactgacataccctggggacattttcccattgtcttggtgattaacattctgctccttgttacttagcaaattgctgtgataggcttgaatttctcctcaggaaatgggtttttcttttctattgcatcatcaggctgcaaattttccaaacttttatgctctgcttcccttttaaacataagttgcaatcccaaaccatatctttgtgaatacgtaaaactgaatgcttttaacagcacccaagtcacttcttgaatgctttgctgcttagaaatttcttccacc

SEQ ID NO: 157 - DNA, 1000 bp, Homo sapiens
  variation 500: note = C->A
  source 1..1000: mol_type = genomic DNA
gacacaaagccaaaccatattaccaattttccttctcgaattaatgctcacagagttgatctttgtgcaatatcttgctatttccaagtggtcgaggcacactgaaagcttctaatccaccatcttgggaaaaaataatctctctctctctatatatatatatttttttatatatatgtatattttatatatatataatatatatataaaagagagatatagagatatctatgagatacatatagatatatatatttatatataaaagagatataaatatagagatatattttttatatatatatacacacatatatacatataatgttaaaaagcatcttttcaaataaatgctgcttgcatatgttaatttagtttgaacaattttggagtggatttcaggacaggagagagaaaaaagcaaagagcaaaacaactccactctaaagggaagtcatagttcctgggtctgagtggtgcttcttgcctccatcctgccctgacccttcatagtctcgtgactttcacattgctctaataagatatcaaaatttgagtgaggggttcagttcctatctctgttctcccagtaatgcaacaaaaagggtaacttgtccctcctctttacattttaaaataaggaagggttgaattagctcagtgtttctcaaggcttgattcaccttaattgactgaagagctttttaaaaatcccaatttctttggcccttgtcatagacattctgattccttttatttggcagaagacccaggcactgacctaatttttaaaagttctgtatatggttctcttgtgcaggcagaattgagatcattggctttgctaaggtatctccagcactgacatcctgtgactaggtggataatttaactcttcctaactctacagaaaaagtgagaagctctagagattccactggtaacctcttcaaggttatgtcacatgctgccactagatggcgcaggcaattcttgggac

SEQ ID NO: 158 - DNA, 129 bp, Homo sapiens
  variation 2: note = G->A
  source 1..129: mol_type = genomic DNA
cgaggagctgaagtgcacttagttccctggaaccatgatttcaccaagatggagtatgatgggattttgatcgcgggaggaccggggaacccagctcttgcagaaccactaattcagaatgtcagaaag

SEQ ID NO: 159 - DNA, 182 bp, Homo sapiens
  variation 16: note = T->A
  source 1..182: mol_type = genomic DNA
gcagcagtgtggaatttgattggtgtgctgtctctagtatccgcacactgcgtcaacttggcaagaagacggtggtggtgaattgcaatcctgagactgtgagcacagactttgatgagtgtgacaaactgtactttgaagagttgtccttggagagaatcctagacatctaccatcaggag

SEQ ID NO: 160 - DNA, 75 bp, Homo sapiens
  variation 22: note = C->T
  source 1..75: mol_type = genomic DNA
gctcccatgttttcctggccccggttgagggatgctgaccccattctgagatgtgagatggcttccactggagag

SEQ ID NO: 161 - DNA, 122 bp, Homo sapiens
  variation 95: note = C->T
  source 1..122: mol_type = genomic DNA
ctcggtgtgtctacaaacttctcgatcagcatagcatcatcattgaaagacttcttagcttctctccgtgctgactctaactgttcttgaaattcttgttctgatctaacaatcctcattcc

SEQ ID NO: 162 - DNA, 78 bp, Homo sapiens
  variation 46: note = G->A
  source 1..78: mol_type = genomic DNA
gtcctttttcatgatgatggtagtgtaaaaggaattgccactaacgatgtagggatacaaaaggatggtgcaccaaag

SEQ ID NO: 163 - DNA, 147 bp, Homo sapiens
  variation 44: note = T->C
  source 1..147: mol_type = genomic DNA
gcaacatttgagagaggactggaactacatgctaaagtcacaatttttgcagaaggttgccatggacatctagccaagcaactatataagaagtttgatttgagagcaaattgtgaacctcaaacctacgggattggactgaaggag

SEQ ID NO: 164 - DNA, 139 bp, Homo sapiens
  variation 87: note = G->A
  source 1..139: mol_type = genomic DNA
cagctatggcaccagctaagagcaggcttcctgggctaacctgcccatcttcatttgcaaaggaagccttcacatgagcatagcacggaaagtagatggccgagaaaggaatgtcccgcagaaagcatgctttggcacc

SEQ ID NO: 165 - DNA, 85 bp, Homo sapiens
  variation 60: note = G->A
  source 1..85: mol_type = genomic DNA
ctgcctctgggcctcagccaagttaaagggcagagttccctcttccagaggagcaatccgttcaatgtctgctaaggtcatacgt

SEQ ID NO: 166 - DNA, 138 bp, Homo sapiens
  variation 2: note = A->T
  source 1..138: mol_type = genomic DNA
cagttgcacggcctccttgactccatggattgagagagcctcctgggtcaggaggtggagaatccggttgctgtgtgcagcctccttccctcctttgagtaacaagccattgccacttgcgatagccaaagctgccac

SEQ ID NO: 167 - DNA, 129 bp, Homo sapiens
  variation 128: note = A->T
  source 1..129: mol_type = genomic DNA
agggtataagcccccagaaagggcctttccaaggaggactatatcaggtctgacattttcataatcaacagccagccatctaccagttctggccaatcctgtctgtatttcatcagcaataaagagaac

SEQ ID NO: 168 - DNA, 180 bp, Homo sapiens
  variation 75: note = G->A
  source 1..180: mol_type = genomic DNA
cttagagcgaaagggttcggggaaccccccatgggggacaccgatgtagccctgcaggaactccaccacggagcggggaaaggacagctcttccgcctgagcttcggcctctgcccggctcaatccattctgcaccataaactgggccaggtcccccacgatcttggaggagggcgtcac

SEQ ID NO: 169 - DNA, 154 bp, Homo sapiens
  variation 60: note = C->A
  source 1..154: mol_type = genomic DNA
gcctgaggatattgaggcctttaaaaattatacactggattcctcagcagcacctaccccacaagcggccccagcaccaacccctgctgccactgcttcgccacctacaccttctgctcaggctcctggtagctcatatccccctcacatgcag

SEQ ID NO: 170 - DNA, 163 bp, Homo sapiens
  variation 1: note = A->C
  source 1..163: mol_type = genomic DNA
aaatcatgttgttgatgtcagtgttgcggtcagtactcctgcaggactcatcacacctattgtgtttaatgcacatataaaaggagtggaaaccattgctaatgatgttgtttctttagcaaccaaagcaagagagggtaaactacagccacatgaattccag

SEQ ID NO: 171 - DNA, 65 bp, Homo sapiens
  variation 13: note = C->T
  source 1..65: mol_type = genomic DNA
cgtctctcggcccggcggcacacggcccggcagaaatgcagcgccgagctgatcttgcctcccga

SEQ ID NO: 172 - DNA, 528 bp, Homo sapiens
  variation 131: note = C->G
  source 1..528: mol_type = genomic DNA
ctgtccccgtcttccacgccctgagggccgcggctctggaaacggggatacaggagcctggcggcgccgaagcacccgcgcaggccaagacggctccccaggccaagacggctccccaggccgcacacagccatgagccaggctgcttgacgggacctgaccccgccaggttcccgtccagtccgcggggtgactccacccacagctggccgcgccaccgctcaggtttcaatttttattggttcgcagttctcaccccagggcgggacactcccagggacttgtttcccattggtttaacggaaggagcggggcgggaaaacccgtgtcggcttggctgcaacacctattgaccaatgttcaagcctattggtaaaggtactccgggctcgcgcgctctgattggctggcctgaagtacaacgcctcctccccttgaggcacgggcgctctgggttgtgggagttggggagctgctccggcttcggcgcggaggggcggcggccggggaggcggcggcggcggcagg

SEQ ID NO: 173 - DNA, 132 bp, Homo sapiens
  variation 122: note = G->C
  source 1..132: mol_type = genomic DNA
gcagcagaagatgtcgttttcattggacctgacacacatgctattcaagccatgggcgacaagattgaaagcaaattattagctaagaaagcagaggttaatacaatccctggctttgatggagtagtcaag

SEQ ID NO: 174 - DNA, 111 bp, Homo sapiens
  variation 93: note = A->C
  source 1..111: mol_type = genomic DNA
ccttttctgaactggcactaccgccacttgttgctgcagcatcaaaggatgttccacggacagaaaacactttcactttctcatcacacttcactgtacatagagcatttc

SEQ ID NO: 175 - DNA, 120 bp, Homo sapiens
  variation 20: note = G->A
  source 1..120: mol_type = genomic DNA
cgcccgccggagctgccccggagccgccgctcggaacatggtctccgcttccgccgcaacctcggccttacagcagccccgtgcccggccaactggcgccgcctcagccagtcacctaat

SEQ ID NO: 176 - DNA, 199 bp, Homo sapiens
  variation 114: note = A->C
  source 1..199: mol_type = genomic DNA
tgggccccctgagaagaagatgggcatcaaggcttcaaacacagcagaggtgttctttgatggagtacgggtgccatcggagaacgtgctgggtgaggttgggagtggcttcaaggttgccatgcacatcctcaacaatggaaggtttggcatggctgcggccctggcaggtaccatgagaggcatcattgctaaggcg

SEQ ID NO: 177 - DNA, 102 bp, Homo sapiens
  variation 73: note = C->T
  source 1..102: mol_type = genomic DNA
gaacctggagtagagcgtgtgctccgagatcttcgcatcttccggatctttgaggggacaaatgacattcttcggctgtttgtggctctgcagggctgtatg

SEQ ID NO: 178 - DNA, 116 bp, Homo sapiens
  variation 21: note = G->A
  source 1..116: mol_type = genomic DNA
ctggtactcctcctccaggcgtgacagcagcacggcctgctccactgtcaggcgcaggtcaatcaggcccaaggttagcaccatggacttgagctgggcagctacaaactcaatcc

SEQ ID NO: 179 - DNA, 172 bp, Homo sapiens; identical to SEQ ID NO: 147
  variation 96: note = A->T
  source 1..172: mol_type = genomic DNA

SEQ ID NO: 180 - DNA, 183 bp, Homo sapiens
  variation 56: note = C->G
  source 1..183: mol_type = genomic DNA
gtacaacgccgccgccattctgaccatggagcccgtcctggggggcaccccgtacctggacaaatttgtggtgagctccagccgccagggccaaggctccggccagatgctgtgggagtgcctgcggcgggaccttcagacacttttctggcgctcccgggtcaccaaccccatcaatccctg

SEQ ID NO: 181 - DNA, 183 bp, Homo sapiens; identical to SEQ ID NO: 180
  variation 68: note = G->A
  source 1..183: mol_type = genomic DNA

SEQ ID NO: 182 - DNA, 152 bp, Homo sapiens
  variation 77: note = C->T
  source 1..152: mol_type = genomic DNA
gtacagcaacatctttcatgtcttcatccgcatctcgagagaagaggggctgaagactctctaccatggatttatgcccaccgtgctgggggtcattccctacgctggcctgagcttcttcacctatgagacgctcaagagcttgcacagag

SEQ ID NO: 183 - DNA, 2957 bp, Homo sapiens
  variation 207: note = A->G
  source 1..2957: mol_type = genomic DNA
ctggcactgtgcaggcccacagctgacggcgatgacctccttcaccagcttcttctccttgagccgcacagcctcctccaccgcgatctcacagaaggggttcatggagtgcttcacaccatccgtgaccacaccggtcctgtcaggcttcactcggatctgcccagcaggaggggaaggggtggggtcaggaggaaacaggcaagaaggtgggggcctcagcgccaaccctctcccaggctggatgaggacaacgacagcctggaaaggggcagggccttgtccggggtcacacagctccagggacagaactgggttagagtttgtaggcaggggcaggtcaccctgtctccttctctcatccagccattcctgggtaccagggacatctgacttgatcatccctactgttgtcactgctcctctcaggcctgaaagagtgtttctcaaatttacagtatttatggtaacccacagtgagaggtacattttactgtatctccaagtgtatataaatacataatacactgatacataaatacaaatgaggagaagaaaaggaaaaaccagttaggtagacagttaagggtggtcctcagaggagcagcctgcctgaaaaatcacagctacaggcaacaatagagcagcctggggaaaactcaagctgcccagcacagaagccttttgttctttgcgtgactgacaggctcccaggaaaagttccctccccttttcaggcacgtacatggtggtctctgtgggaacttgcacggggaggggcggagcttacctaaaacaaacccacggttacagaaacaagagaagcggagctttgtgcttgcctaaagacgtacccacaactacatagataacggagagttatgcagatagctttacagataagatactcaaacagctacagagatgaaaggagtttcttataaaagcttttggtgtcttttgctgtgcagaagctctttagtttaaccatcagagtgaacaggcaacctacagaatgggagaaaatttttgcagcctactcatctgacaaatggctaatatccagaatctacaatgaactcaaacaaatgtacaagaaaaaaacaaacaaccccatcaaaaagtgggcgaaggatatgaatagacacttctcaaaagaagacatttatgcagccaaaaaacacatgaaaaatgctcatcatcactggccatcagagaaatgcaaatcaaaatcacaatgagataccgtctcacaccagttagaacggcgatcattaaaaagtcaggaaagaacaggtgctggagaggatgtggagaaaaaggaacacttttacactgttggtgggactgtaaactagttcaaccattgtggaagtcggtgtggtgattcctcagggatctagaactagaaataccatttgacccagccatcctattactgggtatatacccaaaggattataaatcatgctgctataaagacacatgcacacatatgtttattgcggcactattcacaatagtaaagacttggaaccaacccaaatgtccaacaatgatagactggattaagaaaatgtggcacatatacaccatggaatactatgcagccataaacaatgatgagttcatgtcctttgtagggacatggatgaagctggaaaccatcattctcagcaaactatcgcaaggacagaaaaccaaacaacgcatgttctcactcataggtgggaattgaacaatgagaacacatggacacaggaaggggaacatcacacaccggggactgtcgtggggtggggggaggggggagggatagcattaggagatatacctaatgctaaaggacgagttactgggtgcagcacaccaacatggcacatataaacacatgtaacaaacctgtacgttgtgcacatgtatcctaaaacttaaagtataataataaaaaataaataaataaataattttttaaaaaaaaagcttttggaatcaactgtaaaaatggcaacccgcttgggcttccctctcctctgtggagagctttcttcttttgcttattaaactttcgctccaacctcaccttttgggtggtctatgctctttaattctcttggttgtgaaacgagctcggataacaccttagacaacgtgaccagtgaccctgacctatttcacaaatgccactgcagtgtaagggtcagtgaccaatactgaccctgcctacacacacaccatactctgacattttctaccctttttcggaaaaatgccagccctctgcctggatgtcatgatcacacatggtcacaacctaatttggaaaacaccagcatgaaagacctctttgctaaacagacaagggaggtaagggaggtgggtggcaaaccccacccatttgcttctgcacatcatttttgtctctcctgggccccactgtgtgcctggctctgagctggatcctggggacaccatcatgtgccagggagagaggcttccggtgtagaccagggtgtagcgtgaaccactaaccactctcctattagtttctctcggctgccgtaacaaatcaccatatatttggtggcttagaatcttacagctctggaggccagaagtccaaagtcagtgtcaccagggtgagaccaaggggtctgcaggccccgggaggaacacgtttcttgcctcctccagcttctgctgacactccctggcttgtggctgcatcgctttatcttcaatgccagcatcctcagctctgtcttcacgtggccttctcctctctctgcgtgtctagtctccctctgtctctctcttataaggactcttgagatggcattcagggcccacctaaataatccaggataatgcccccatctcaagatgcttaatttaatcacatctgcaaagaccctgtttctaatttcttttttttttttttttagatgggctctcgc

SEQ ID NO: 184 - DNA, 1000 bp, Homo sapiens
  variation 500: note = A->T
  source 1..1000: mol_type = genomic DNA
acaggatgggtgggctggctcaggctgttgattcaggtgagtggatgctccaaatgcctggatatctgccagagggtggagcagagagggcctgggcttcaccacagtctccacacaggaatggttgggtggcttggtatgctgatctgggtgaatggtagctgcaactgctaggagatctgcctgggcatgaagcagagagggccctgctgtaccatgatctctgcacaggcagggtggggtatcttaggttgctagtcaatgtcaccaggtgtttcaaatacctggatttctgcctgggagtggagtggagagggacccactgcaccgtgatcccagagaaggaggttgggccacccagaaatgatacacataaacctgttctatgtctccaagctggtcctggctgcaagtctcctcatccaggagaaactggatgagcagctttcctccagctccaggcctgtgacaggggagagcacaattccagtgcctactgatgaggcactttctgtaattctggctgtagagacctctacaccactccagagcaagcgctccaatctctggcccaagacaaaaatgcctgtgcagccacggtgccagattgccaaagaatggctgactttgtatgcactcgggttaaaaacggcatcctgctttcagtcctgggtctgagaaaatgcctgcagcttttccctgtgtcttttcctctcagcacttccaagcctctctccaagttagctccaggacttgggagaaaaaagtgctctccctcagcctaggttgctgggatccccagtggaaaggtgagtagtagagggaggctctcctcccctctcacgtactggggcttcacacattgtcagccagatgccatcatgagggctgtttgcccacgttcttctccttgggagctggagtatctttcacaatatcaggggattcgtgttgtattagtttgttctcacactgtatgaagaaattcccaagactggat

SEQ ID NO: 185 - DNA, 1000 bp, Homo sapiens
  variation 500..504: note = AAGAG->A
  source 1..1000: mol_type = genomic DNA
gtgtaatttataagggaaaaaggtttaattgactcacagttccacatggctggagagccctcaagaaacttgcaattatggcaggaggcacctcctcacagggtggcaggagagaaaatgagtgccgagaagtggggaaagccctttatatagccatcagatcttgtgagaacccactcaccatcatgagaacagcatgggggaaactgcccccatgattcaattatttccacctggtcccacccttgacacgtggagattatcacaactcaaggtgagatttgagtggggacacaaagccaaaccatattaccaattttccttctcgaattaatgctcacagagttgatctttgtgcaatatcttgctatttccaagtggtcgaggcacactgaaagcttctaatccaccatcttgggaaaaaataatctctctctctctatatatatatatttttttatatatatgtatattttatatatatataatatatatataaaagagagatatagagatatctatgagatacatatagatatatatatttatatataaaagagatataaatatagagatatattttttatatatatatacacacatatatacatataatgttaaaaagcatcttttcaaataaatgctgcttgcatatgttaatttagtttgaacaattttggagtggatttcaggacaggagagagaaaaaagcaaagagcaaaacaactccactctaaagggaagtcatagttcctgggtctgagtggtgcttcttgcctccatcctgccctgacccttcatagtctcgtgactttcacattgctctaataagatatcaaaatttgagtgaggggttcagttcctatctctgttctcccagtaatgcaacaaaaagggtaacttgtccctcctctttacattttaaaataaggaagggttgaattagctcagtgtttctcaaggcttgattcaccttaattgactgaagagctttttaaaa
